United States Patent Application Publication US 2020/0377945 A1 - sequence listing, part 17

SEQ ID NO: 3396 - DNA, 97286 bp, Unknown
  gut microbiota DNA sequence
gtattgagtttttttaggtataacatattattttctccatgattactataaataggtagcattaatccgtaattagtataattagagatgtttaggaaaaaatgaatttttaaagagctgcccctaatgaaactacaaagcgttgataattatcgatttcaattttaccttttttaacatcttttgttataagatatggtccaatagatagggcgtctaaattagttttttcaaaacatttcagagcatccataggtgtttcaactataggttctccagcaatgttaaacgaggtattcaataatataggtacacctgaaagcttttcaaactcatctaaaatattgtagagaactgcattttgagtagaggtaattgtctgaactcttgcagttttatccacatgagtaacagccggaatttcattgggtttaaggacatttgccactaacaacatatagggactttcagctccgtgcttgggcagctcctccaacagatatttgaaatactcgtatggcttcaggttattcgctttggcagtttcagctatgctgtaggcaatggcactgctctttgctccgccgctcgtatcaatcagataccaattcttcctgcccagagtaaaggggcgaatactttgctccgcagcattgtttgtcatcgggacagcaccatctgtaagaaatacccgcagaaacgattcctgattgatgcagtagctgattgccctgccagtcttcatttttggcgctacgtgaccctgctcgtatttcagatacgcaaagaatgcggcaaccaatggggcaacgtttctttttcgctgttccagactctcttcgggaggcatatccgcataaccctgctcataccggaacatggtctgtataatctggaacgccttatagcagatggactcctgaacggaccctttttccttaccggcagacttcacaacatcggcaaagtcccttctggcatgggaccagcatccggcaatcgtaaggtcgttccgttccctcgcgattgaatggtatacctcatatccgtccgtcacgcagatgccactgcaatcctttagaaactgtctcggataatccgctttgcgtcctttctggtattcataaaggacaaaaggatgtgcttccagtgatccggtccggtacacccacaatataactcctggatctggcagggcgaccattctttcgtacttcaactggtgtttcatctgcgtggaggacatgatagtcattgagtttttccctgagacggtcataaatcctcttcaggtaacagtctgaacagacattcgcccagcggcacatggtcggttccggaaggaaaacgttacagcgctcgaactcttttaccagtcgctggattggctgtgcattgacatacttggcgttgtagatacctgcggcgagggaaggcgtcacgatgctgttgcgcagaagatcagcgggacgctcaccacgcacgaacgtcctgccgtccgtgctcacaaagacctctacatgatgctcgattacctcaaaggaggcgggatggaaagccagtctcttataaacttcatcagggagctgcttatatttcccatctgggaacgctctctggagttgtgcttcgcagacgggatggctgactgtgcttacgggcagatccttcagttcttccccgcgttttccaatcaccttttttccgcgtttataagccttctagtggatttcttcgaaggtaggttccaggatatccggattcaaatcaaccgtcatctcggtttcgttaaacatgaaaccaagctggaagtgaccctccgcttccgtcaggcccttttcggaagaacgaccaaaccgatgctggcgcagatgaatgacctcctccgtaaggatatcaatactctggctgagcttctccacggagtcctgaagtcccagatacatcttgatcaatgtttgtttgtcaaggtttgatagttcttgttcgtccagtcttaccgccatcgtccaagactcccccttcctgaatttcatttaggaaagtataccagaaacgctcgggaaaagccactgattgatttggaaacatttccaatttagaatacttgtgtgcagttgacctttttatggtcggacgttccaggatcgtcataccatcaagaagccgctggagttcagcctggctgagctgcacagcttcctgttgactgcggggccatcggagacggccggcttctatgcgcttgtaaacaaggcagaacccatcgccttcccagaccagccctttgaatcggtctgatctggtcccgcaaaaaaggaagaggacatttttctgaaaagggttaagattgaactgttcctttacaagagcggccagaccatcgattcccttgcgcagatcacttttacccgcatagagataaattgcttcgaaaccattcatcttagacaacatcggtcatcaccgccttaagaaaagcgaggatattgtctggcgcatcaccgctgacttcaatgacggtatccgcacgacggattcggagagcaacagcggaagaagggtccgcagggcaaaagggaacccgcatgaatccaccggtatgttccatggacgtctggcctgccgcagccagcgctgtattgcgcagctgcctgaggcgatagtaatactgtgactcactgacattgtttgctgcgcaccattcttcgatggataggccgctggcactacgttcttggaccatggctttccaactagccatacgtacttcgacgacctcgttcatagagagtagcatcctttgagttacttgaaaaacttctaaaagttttcaaagtttttcaagtagattcttctaggagcctattatctcacagactggggctctaatcagcctactcattatgaatcacttacaaggcatctatttctcacgccctgaaaaacacccatttccaggccgcaaatccactcaattttccctcaaaaaccactacatcttgtggttttattctcattttctctccaaaaccacaatttggcatctaaactaccgtagcttaatgcctatgcatcgaaaactcatccataggatacttcttcagattctccagcacatgcctctcctcggcagacccaatcagctgttccctggccttcttggcctcggtctcagttttgtgccggctgggaccgcccacgcagccgcctacacaggccatgccttccacgaaatcttccggaagctttcccaccttcatgagcagcaatgccttcttacactctgcggctccgttacagcgggctactttgacatctgtgttttcatccatttccttcaggcattccagtacggccgctgtcacgccgccgccgttgccaaaacgctttccaaacacagagctttcctgataatcgttctcggccggctgaagctctactcccttggcgcgcatcatggctcttatctcaccaaaggtcatggcataatctgcatttccctttacattcaaatccaggctctcgctcttcttggctatgcaggggccaataaatacagtaaccgtatccggatccccgctctttatcattctggacactgcgcacataggcgacaccgtggtggacatattctccagtaacattggaaaatgctgcttaatcatgttcacgaacgcgggacagcaggaggtagtcatcttctttccctccttatgggcctgggcccattcttctgcctcataggcagcggtcatgtctccgcccaatcccacttctatcatgtccgcaaatcccagctgctttaatgcaattttccagctggccatggtaatgtcagggccgaactgcccctctgtggcaggcgccaccatggcaaccacccgttttcctgccttaatcaggcgaatcacatctaccatgaaggtcttggaccctatggctccgaacggacagctatggatgcaggctccgcactggatacatttcttctcatcaatcacgcagatgccatactcatcataagtgatggcatccaccggacaaattttcttacacggacgctccagatgggcaatggcgttatagggacaggcctgtgagcacttgccgcattccttacatttgccgggctcgatataggcccgctcacgtcccatgctgatggctccgaaattacaggagttctggcaggcctttcccatacatttacggcagttgtcagttactatgtaggatgcaatgggacactcctcacaggcagcattgataacctggaccacattggatgtgtccttcccggttggacattttccttctgccaggcggaccctctgccggataatttctctttccttataaatacagcagcggtaagtcgcctgaggccctggtatcatggaatatggaatctgctcccgcttctcgtccagattcccttcccatgcagctttagccacctcgtaaagtacatcatgtttcaaacgcaggattgtcgcatcattggttaccatctttttctcctccttgttacgggcacttggagaccgtcctatggtctcctgcgcattacatatcattggcttatcccatatatgtctgcttctatatcacaattcgagtttgttaaaattatatcaacactagaaatctactatatttaccctgaaaaagcaagtattaaatgacatacaacattagtaatatgtcaccactactgtctttcccatctcctcaatcacatgcctcagctgttccaccagattctggcggatacccaggtcaaagggaagtcccggattctggtacgcactgttgattgccttccccacatacaggtgcacctccgtgcagtcctctatgagcaccttggccaccatagaacccccgttgggcttatccaattcatgaaaaaattcttcggatacagtctcatttttcacatacctgcgaagcagctgaagtacccggttaagggtaagaactccctccgtaaccaaatccacaccttccatgtatgcaatgggaggtatctccggatccacataatccagtgatacatccagtttcttccccagcaccctggacacgatagtggcgctggttcccccgcatacaatggtcctggcattgggatcatccataaaatcctggaccatacgaacgtcgtcttccggattccttgcaggtccggtcatgaggtgaacaggcttgctgtcaataatccgcatgcacgccaccgtagtatcatcccctggacggaactgatacagctcgtcacaggccctgctgatgctggcggccagacgcatggccgacacggtcagaggatactgtctcactgcatagtccgcaatgtcctgccacagccatccaaagttcagcagttcacccacccctgcatggatggtgccgtcgctcatgagaatcagggcatcgccttttttgaccttgaacctgtattcattgatttccttgccctgcatgacccgtacatttttcggaatctccataagctttccgtcccggataaatatgcatccgggattatcatattccaccagatacgcatccccgttgtggtatacctgcagtatgctgaaggtggaataagccacctgcctgacctgacagatggggagagtctcactgatggtatccacacactcctccagggtagccccattaaggaacatggttcctaatatcttagaggtcagcgtggacaggatattggccttgactccgcttcccataccgtccgccagaatcatgatgttggaatcctcggtctgcaaaagctctaccttgtccccgcacaggatttcggtgtacttgttcaggcttttatatgcaacatccactgtaattcccattatttacctccgttgccgcctggtttctttaaatccacattgctcagatggacatacccggactttcccccgcccggattggcgctgcctatatggacataccccgtaggctttttctgttcaccggcattatctgccggattcccggctcctgatgccggcccggttcctgatatctgtccggctcccgctccgccggatcccccggctgtcataacgccctttaagggcacggctccgcttcccagctgtacgccaggaatttcccgctccctttctcccccggcatacccggcatcactgccatcctccagcaaggagtggcacagcttggtcagggtggtttttgtctcggctgttgtctctcccagcaggcctgctatctcctgagccaccatcatctgtttgtggatgaccttctgggccagatctatggtttccagctttctctcatattcttcctgggccagctcctcctcacgggttatgtctatgaaggtggccaggactgcattttccttttctatgtacacaatgttctgcagggtggaaagattatattccggataattcacccgcttgccgtggatgttctggtgtgtatcaaatacccactggaagttcactgggtcgataagttcatacagatacatctgcaatgcctgggaacgggtccttccaaaatatctctcgcccacatccgagtactccatgatgcgcatgtcatctcccacaatcagtacgatgttgggtgaagtctccatcaccaggttggccatggattccgccttttcatgcataaacgggatacacatgctcacctctgccttgtgctggaatacggcaatggccttttcacggcaggtagggtaaccgcaggcgccgcagttcagctcatcctccggcttcagcttgttggtcattcgcaggatttcccgtatctgttcctccgtaggctgggggtccctgggggaatggtcctcgaactgcttcctgaaattcacattatcccataccggctccatctgcgtttcctcagccggctccctgcagatgctctcctccatgtccagcttaaccttaaacctggatataaactcctcatctaccgtggggcctttgatgcagccgccggaacacatattcatctctataaaacagcccttgatttctccccgggacatactcttgcacaaatcaatacaattgtcttccccgtggacatagaactttctgtatccatcccccttctcctcggtagccagcacggaattcaccacgccgttggtcacaggatacaggcggtttacctttgggtcaaatgcggtaaatggccggtcttcacagtccccgattacgatgtcttcttcctccagccatttgtttatgtcattaaaatttaatacagcatcaatatagccctcatgcctcaggtccatggcttccttcttcttggcaatacacggtccaaggaacacgaccttcacatcacgtccaagttcttccttcaaaagctttccgtgggcaatcatgggagacacaaccggtgccaggtagggtataagctgtggatagtagatttccaccaggtcattagcacttgggcagcatgtggttataatattctccatcttgtgctctgccagaagcttcgtatactcagccgtcacaaaagcagctccctcggaagtctctctcacatcctcgaatcccaggcgcagcagagccccccgcacctgaccgattgtcttgtattttaataaacccatataggacggtgctatggacaccaccacacgcatgccttcgcgcaaaaatccgcgaaccatgttcaggtcgctcttaagggtttttgctgactgaggacagatcttcagacagtgaccgcacaggatacacttgtccggcatgatgaccgcccgctcatccttgacctggatggcctttaccccacagtagcggacgcatttatagcagtgtttgcactttgtggctttgaaatctatgatttccatgcccataatcaaagtctcccctttatctcattttcaaaaaattcttctgtatcttccggcttcagggaatacagctcgccctccaccgtcacgcacactccatggtcacaatttccggaacagaacgcaccgtttaaatccaccttatcagacaggctgttctcatccaccagcttctggagcttgctgataatctctctggatccctttaaatgacaggcgcttccaatacatatcgttactttcatcccttattcctccactatctgcgtgtattatgggctcaccccaaaccatggcttcattatctcacattgtgatatttatatcaataatatttctcaaatattttatagaaaagacagggctgttgtgctatagttaatgatatttacgagaggagttgaagtactatgaaaaaacatgtttctttacttttaatagcatttatgggtatcaccctggtgctgggcggatgcggcaagagcacctcaggcacacctgccacagaggctcggacggaagcccaggccgggacacagacggaagctcaggccgacgcacagaccataaaccagaacggtgaaaaagcctcccaggaccaggcctcagaaagcgcttccggcgcagtgtcctcctctgaatccggttccggcgatgaactgaacacgggttttgatgaaaacaagctgacctgtcaggcagccatccgtgtaggctctctaaaaggccctacctccatgggacttgtatccctgatggacaaggcttccaggggcgagacctccaatgtttatgaatttaccatggccggcaaggctgatgaactggtgggcaagattgcaaacggcgatctggatatcgccctgctgcctgccaatgttgccagtgtactctacgccaagacccagggaaatatcacggtcctggatatcaacaccctgggtgtcctctatgtggttgcctcagatgattccatttcctccatggctgacttaaagggacgcaccatttatatgacaggaaagggaaccacccctgaatacgtcatgaattaccttttaaaggaaaatggtctttctacatctgatgtggaccttcagttcaaatccgaggccacagaagtggcatccctgctaaaacaggattccagcgccatcggagttctgccgcagccctttgccactgctgcctgcatccagaaccctgacctaaaaacagtgctggatttaacagaacagtggaacatgctgaacaaggacaccggaagcatgctggtgacaggagttaccctggtacgcagcgattttctcagggaaaaccgctcccctgttgcagacttcataaaggaccatgaggcctccaccctttttgccacagaacatgcggaggatgcatccaggctgattgctgagcagggtattgtggaaaaagcccccattgcccagaaagcccttccctactgtaatattgtatgtctgaccggtcaggagatgaaggacgcattgagcggttacctctccaccttacatgaacaggacccaaaatccatcggcggacagatgcccggagatgatttttactatatgccctaacccctaactgcggagacatccctcatgaatcaacctacaaatcacatcacacgaatacgtaaatatctggtttggctgttctggattgcagtatggcagacagccaatctcctgatacacaacaatattatattcgtaggccctctggacatggtaaaggccctggcagaacaggcggcggacccggccttctgggccaccatcctgaattcctttgccaggataagtcttggattcctgggggcctttgccctaagcatcctcctgggaagcctggcctacctctttcccctggtaaaggagctgctggacccggtcatgcttctgattaaatctgttccggttgcctcctttgttatcctggcactgatatggattggctcccgcaacctggcagtattcacctcttttctggtggtggtgcccatggtctatgtgagcactctgtccgggctgaaacacacggataaaaaactgctggaaatggcccgagttttccgtatgcccatgtggaagcgcatccactatatctatgtgccagccctccttccataccttgtaaacgggtgccgtacagctcttggtatgagctggaaatccggcgtggccgcggaagtcatcggcataccggaaggttccatcggagaacagctgtactactccaaactgtatcttgacacggccgggctatttgcctggacctttgtcatcataataatcagcgcattgtttgaacgtttttttctttatctgctaaagaaaataaagcattaaggagcgtgtatggaatgaccctggaattgcaacatatttccaaatcctatgacgggctgcccgtattaaagaacctgaacctgtcctttcagcagggccaatgttattgtctcatgagtccatccggttcaggcaaaactactctgctgcgcattctcatggggttggagcaagcagaccatggcttgatactggcagacggaaccccccaggacatgagttccctgcctgcttccgctgtctttcaggaggaccggctctgcgaatccttttctccgattgaaaatgtagccatgtgtgccggccggtcgctcaaggctccccgtattaaatgggaattggcccgcctgcttccggaggaatgcctgaaccgccctgtatccaccttaagcggcggcatgaagcgccgtgtggctgtcgcccgtgcccttcttatcccctcccatattcttctcatggatgaaccttttaccggcatggatgacgaattgaaatgcaatgtcatttcatatatcagggaaaaacaagacggacggcttttaatcctctcaacccaccaggaggaggatgtggaactcattggcggagagctggtgagattggaaaactgtatggacgtatgatatgtacgatatacattaaccgagccaaagaaaagcgctacagcccatggtttttcccctgggcctgcagcgcctttcacatataattctgaatacaattcgtataaacagcctgattcagtcacctgcgctggtacgaaagaatgaacttacatctgtctcatctggtcctggcaggatggtaactgcatatcgaaggcagggttgaacgcatagaaattcctgctgtccagcttctcctgggtgatacgcagcagttcaccgaatctctgataatgaacgacttccctttccctcaggaatttgatgggttcacagacgtcataatccttcacaacgcgcaggatattgtcataggtgctcctggctttctgctctgcagccatatcctcatgaaggtccgtaattacgtctcccttggactggaactcacatgcattaaaaggaattcctcctgccgcctggggccagatacctgtggtgtgatcgatatagtaaggtccgaagccctgctctaccaactggtcggcagtcagtccctttgtcagctgatggataatggcagccacgatttccagatgtgcaagttcctccgtaccgatatcggtcaaggttcccttacactctttatatggcatggcgtagcgctgggaaagataacgcatggaggcgcccatttcgccgtccggcccaccatactgactcattataaactgagccatctgggcattgggctctttgatattaactggaaattccaatctcttctcataaatccacattaatagcaccctccttcccatggccacggatcgttaatccaggaccagtatgcagcatctgtattagcggaagctgtcaaaggtccaaactgcgcctcaaaggctgcggcggcgtttctgtatgcgtttaccatctgattatagtaatcaatggcggctgcgtcacatggatgggtgtcaaggtagaggttggcatcaaccactgcaaagccggcctggtccacttcacgaagcatggcctcacgggaggcattaaagtcgggattcatcatctgattcatcatcttccgcacctcccgtaattaaactgtaaatccaggtcagggaaaatagtcccctggacaaggcctctttcaggggcataggtggtctgccactgctgccacggtacataagccatggccaccggaaactgctgttccagcacgcctccctctgtggagggacacgacatattggctggctgagtgactggggctgcaggtgtaggataggaaagcgcaggattgcttccccatgagtcccatgggaatgcgttcatgtccggataatccggacttgtataagaaccgcatccatttccaaacgatgtaccgcaagacatgcggccgcggccgcagcactgggtacttacatctgtataagaatccataggttggatactccttccaattatctttttctactatagtttatgagaagaaaaacaacgggtgacaataaaatacattgagacaatcactcacactttgtctgggcgtcccatatgatatagtacaaaccaacaaaaaaggagagtacaatatatgtgttgctttagactttgtagatgtggatggaatcgttgtaattgtggatgtggctgtggctgtaacaacagtggttgtggatgcggcagcaacagtggatgctcttgcggcggcagtaacagcggatgcggctgcagcaatgacagtggctgtggctgtggatgcggcagtaacagcggatgcggctgtggttgctcttgtggtggaggaaacaacagcggttgcggcggtcatgatatctgtgcaggcgccagacgccaggcatacagggaaggcttccgcaatggctattgggaaggcttcaacgatgcaacctggggcaatccaggctgcggcggccccaccccccgcacggccggaggacctggtccagctatcgccgaaaacagctgcggctgtaacaactaatagaaattggcaaacaacaggtatacggaacaggacctcctacgaggccctgttttgcatcttctctgttttgcatctgctctgttttaaacactctttctttcctaatcacctctacatcacagacaaccattgacaatcttcctttttctggtatatagttggcttatattcactatcatttcatacatagaaccacaggaggttttccatatggatgcacaaaaactggaacagatacagaaggtctttgccaacgaccgtttcgctacggataacggggctgtcattgagcaggtggatgagggatatgcaaaatgttggttggaaatacaaccacaccatcttaatgcagccggcacagtcatgggaggggccatctttaccttggctgactttgcctttgcggttgcttccaactggaacaagcccctccatgtctcaaccacgtcccagatcacctacctgggtgttgccagaggcacacgcctcatagcggaagccagaaaggtaaaggaaggccggagcacctgctactatctggtggaggtgaaggatgacctgggcaatgaggtggcccacgtaacggccagcggtttctccaaaggatagaggaatcaatcacccgcatcctgcgccttctctccaaatatgccaagccgtatttccggggtatcaggcagcaatcatgcaaaggtgccgagaaatcatctcaaatgatggtttctcggcacctttatcttacctttatcttacctttcactcactatccattatattccggtcataccagactaccagcacatttcctcattactgtacagcaccaatccgccgtctgtcactgccctggctgccgtctctccgtcagatgccttcacaatcattgccctgcggttggcggaagccagtgcgtacatgtactcaatgttcagcccctggctgcagagaatgtgggtcatcttgtgcagttcccccacctggtcctccagttttactgccagcacatcggtcagcatggctgaaaatcctttttccctcagcgctgcctttgccttatccggatcagacacaatcattctcagcataccatactccgtggtatccgccatgctgagggacagtatgttgatgtcctgctccttcagtacttctgtgacctgctccagtctgccttcccggttttctataaatacagataattgttttacaaacattcttgcaccccgccctttcttaattcagattcctcttgtcaatcacatgcttcgttttacccatgctccgctcaatgctctttggctccaccagctttaccttcacagccagacctatggcctgctgaatcatataggcgatctttcctgtcagattctccagctcccggatttcatctgagaagaatcgctcctccacttccacctgcacctctaaggtgtccagattgttcacacggtccacaatcagcaggtaatgaggcgtggtgccgcccatttccagcagggcagactctatctgggatgggaatacgttgacgcctcggataatcagcatgtcatcggtccttcctgtgaatctggcaatcctggccgtggtccttccgcactggcaggtactgtgatcaaggctggtcaaatcctttgtgcggtaacgaattaaaggcagcccttccttggtcagggtggaaataaccagttcgccggtcatgccgtctctcagcggcttcaatgtattctggtccacgatctccggcaggaaatggtcctcatggatatggagtccctcatggaactggcagtctgtggcaacgcccggtcccatgatttcgctgaggccgtagatatcgtgggcgtggattcccagctgacgctcaatctgggttctcattttctcagtccagggctctgctccgttgatggatgccttcagtttaatcttatccttgacccccatctcctcgatggtttctgcaatatgaagaaggtaggacggcgtacacatgattcctgtcacaccgaaatccaccatcatggtcaccagcttcttggtgttgcctgtggacatggggaccacggtggctcccatctcctccgcaccatagtgggctcccaggcctccggtaaacagaccgtatccgtaagccacctggatgatgtcattgcttcccagtccggccatggtaatgcaccgggccacgcactcactccacacgtcaatgtccttgcgggtatatcccaccaccgtggactttcccgtggtgccgctggatgcgtggatacgggtaatctgggaattaggcaccgcaaacatgccgaaggggtatgtatctctcaaatcatcctttgtggtgaacggaagcctttccaggtcctcgattccccggatgtctcccggctccaatcccactgcctgcattttcttgcggtaatactccacactgtggtacaccctgtcaactaattttctcagccttgcgctctgcaggttggtcatctcatccctgctcatgcactcctttgtctcattccatatcatttgcctgtaacccctccaactctcacatgacatatttttatatcccttatctgcttacaatccactctccggtttacttcccggcttctgtccgactggcttctgtttgaccggcttctgtccgtctaaacagaaagcgcataaccggtctcaaatgcctttttattaatttccaccgtcttaggcggaaccgttgtctcgattaccttcagccagtcttccttctcaaatcccatgtgctttgcagcggctcccaggacaatgacattgaatgccttgggcgcgcccatctttttcgcttcctccgtggcctccaccacaatggttctgcgggcttcctttaaccggtcaatgattccttccggatactgagccacccctgtcaccaccgtaatggggtcaatgcgccagtcattgacaatgaccacgccgtcttttttgaggaaatgcagataccgcagtgcctccagacgctcaaaagcaatcagcacgtctgcctggccttcctctacaatgggttctgccactttttctccatatctcacaaaggttaccacgctgccgccgcgctgggccatgccgtgcacctcggacaacttcacgtcaaagcccgccccggttgcaagctttccaagtatgcggctggtaagaagggttccctggccgcctacgcctactatcataatattctttgatgtcattttattcacccgcctttaccagattgattgcgtcaaatttacacagctgtttacacagtccgcagccattgcacatggtctcgtcaatggatatggtgccgtcctcattctttgtcagggcaggacagcccggtcttaaacaagctccgcatttcttacacttatccggcagcggcctgcacttgttggggaatttgattcccttaagcagggcgcagggcgccttggtgatgatgacggataccgcatcccttgccacttcctctttgattacgcgctccagctccgcctggtcaaaggcgtccacctcgcagacatgctcaatgcccagtgacttgcacagaccgtaaatattgatggcaggaaccacctgtcctttaagggtcttgcctgtggcggcatgatcctggtggcctgtcattcccgtggtggaattatccaggatgatgactgtgccggtggcctggttgtagaccatgttcatgagagagttgatgcctgtgtgcatgaaggtggaatcaccgattacagccacccagctcttaatatactctcttccctttgccttctccataccgtggagagtgctgatgctggctcccatacagatcgtggtgtcaatgacgcttaagggcgccactgcccccagtgtatagcagccgatatctccggcagcatgtatcttcagcttgttaagcacagtgtatacgcttctgtggggacatcccggacacaggatgggaggtcttgcaggaacctgggccgccttatccacctgtgatgtctggcccagcacacgctccctgatcaggtttgcgctgtattcaccctgaaccgtgaatatttccttgcccactgccttctgaatgccccaggatttaacctgttcctccaccaccggctccagctcctcaaatatgtaaagcttatccaccttggccgcaaattcctcgatgagcttccttggaaggggattgagaagccccagcttcaggacagacgcctgaggcatggcttccttcacatactggtatgcaataccgttggtgataaagcccacggataaatcattgtattccacccggttgatgggcaggctgttggcatcctctgccatttgtttcatgcgcgcttccaccaccacgtggcgtttgatggcattgccgggcatcatgacatactttgccatatccctctcataggggatgtcaaagggctctgccctctcctccagttccaccagcccctgggaatgagacagacgggtggtactgcgcagaataacaggggtatcatatttctcactgagatcgtaagcatatttcatgaattccttggcttcggcactgtcggagggctccacaatggggaccatagcagccctggccaccatccggctgtcctgctcattctgagagctgtacatgcccgggtcatctgccaccaccagcaccagtccgccccgaacgccggtgtatgccgccgtatatagcggatccgcagccacattcatccccacatgcttcatgacgcacatggaacgcacgcctgctatggatgcaccgatggccacctctgtagccaccttctcgttgggagcccactccgcgtaaatctcatcgtactggaccagagactcgctgacctccgtactgggtgtgcccggataggctgcggatacctttacccctgcctcataggcacctcttgctatggcttcattgccaagtaatattcttttctctgacacgttttttccttcctttcagtatgtattaactgcaccggacctcttaataactgtcctgatgcctcatcagacttcctttcgcaggtccgtgaccctctttgcctttccctcaaaccgctgaagggtgttgggggataccagctgaatcttggcatccagaccaagcatcaggcgcatcttatccttcaaagtgtcctccagccgctcaagggcagcataggagtccatcatactctcagcttccacctcaaccttgataatcaggatgtcggagtggttcttcctgtccaccacgatttcatagttaggcccgattccctctgtattaatcagcacttcctcaatctggctcgggaatacgttgacgccccgaatctttaacatatcatccgtacgtcctgacaggttctccatcctggcggtggtgcggccgcagggacagggttcatacattagcctggtaatatccctggtacggtaacggatgagaggcagcgcctccttggaaatgcaggtgataaccagctctcccttttcgccgggaggaagcacttcccctgtggcggaatctattacctccgcaataaaatggtcctcattgatatgcattcccttaagttccaggcattctcctgacacgccgggacccatcagctcgctcatgccgtaattctgggtcaaatttacatcctctccccataccttgtaaagctcattcctcatggcctctgtcatcagctcgctgcccagtacaagggtctttaccttcaggtctttcctgggattaattcccatctccagagccacctcagcaatgcgcatggcataagagggagttgccaccagcagggtagtctcaaaatccttcatatacatcagctgcttctgggtattgccggtagaggacggaaccaccgcagcccctaccttctccagtccattgtgaagtcccagggcgccggtgaacatgccatacccaaaacaaatctgggcaacatcctcgtccgaggcgcctcctgccacggccagacgggccacacattccttccacacctccaggtcattctccgtataacccaccacagttggctttcccgtggtaccgctggatgcgtggattctgcgcagttccttctttggaaccgcaaacaggccataggggtaattgtccctcatatcctgtttcgtcacaaacggaagcttctgtaaatccttcagtgtctgtatatgctccggccttacacctgcctcctccatcttggcgcggtatgccggtaccttttcataaacccggttcaccgtgtcttttaggcggctcagctgtatcgcttcaatctccgccctggacattgtctcctcttttgcccaaatcatgttgtctgacctccctttccctgcccccgcatctcctgtctggtttcctgtactatcttactttgacgtgacaacgcattggcgcattatattgtctggcgacattataccatcttttcccgggtttgtctgctgttttcatgcaaattccatatgagttttctgtttgcggtttttacaccggaagcatctgcacaaaacctaacagcatccatagctacatcttatcacagtttcatgacttaggccatattagggctcatattaggacagggacatattgaccatgtccctgtatattaacagggaaccatgtctcccgccttatggcgttttccatggttccctgcaatcgcacagccctcaccgtgccggaccgccctgtcccgctacaccaggactccctcctgactgcgcagctttaccaccgcggacaggtccgtctttttatgttcctttccgccctggtcctgacacttcttggaacgttcctcggcggtttcgcacttctggtaaaaatatttgataatgtcctttctggtaatgataccaatgaaactcttctgatcatccagtaccggcacaaagttctggttcaatgcctttccgatcagatcctccatatctgcgtctgccttaaccggacggttgtcacaccggcggcgtatggctgtaacaggtatcctctcagccccttttagatccagattaaactggttcttgattccccataacaggtcaccctccgtcagcgtccccacatagcgacctgtcctgctgacaatcggtactgcggaatacttgtggtgctccattttctccaaagcctgtcttaacgtatcatcctcgcttatatacgccacatcacttttaggagtcaggaaaaacagtatgttcattttttcactcctttttcccgtattcttatttaagtataatgcctgcctctgaaccgaatgtgaacaaattattataaatatctgaaatttcttaagatgcagaaaatacagatatatttatatgtgcattacacctgcaggagccgccgtactctgtctgaccaccaaatacggctgaaacataatatttttctttgtatcctgtttctgtttctggcgaataatccgaatcatctgctggaccgcctctgttcccatttcctccactggctgatgaattgatgtaaggggcacacttaatatctctgaaaaaaagatatcgtcatatccaatcagcgatatgtcctccggaacagagattccctgctgttttagatagtgaaacacaccatacgccgacatatcattataagcaaaaattgctgtaacatcttttttgagcagatattccgccccccgcacgccgctgcttaagtcatagtccccataaaatataagggacggatcaaattccactcctttttccatcagcgcccttatatagccctgcgtcctccggttggaatcagccagatcctttgggccgcccacgcatccaatcctggtgtggcccaattccaacagatgtctggcagcaagataacctccctcatcatggtccacaatcacggaacagcctttgacttcaggataaaagcggtccacaaggacaaagggtatgttgagtgaatccatcagagccaccatttcctccactttttcactgtcattctcccttgccatacagattaatactccgtctacccccttgtcagccagcatctgcagatatttcatctcgcgctcatggagatcgttggtgttgcacagtatgagattccagccgttcctgcggcattcatcttcaatggacttagccatattagcaaaaaagttatttcggatgtcagataaaatcaggcccagggtttttgtctgcttctttaccagtcccacagctaattgatttggacggtaattgagttccttcgcagcctggagaatggcctcttctgttgcctttggaatcttatgtgcctttccattcagtaccaatgatatggtggtaatagaaaaacctgtgtacttcgctatatccttaattgttgttcgcaaatcctgccccctgttaaaacatgctcaaaatcttacatttcattatatcataagtttattatttagcaatgtaccagcaaaatttttccatgactctaattgcctcaaaatacttggatatctccacgtattcattgggcttatgacacatctgaggctctcccggaccaaagagaagtgccggactgtccggccaggctgtcaggaaaatggaagcgtctgtaaaatagttgataccggtctctcctgcattatcgcctataaatcctttcagcctgtgaagccactggttttttgggccggtctctaccggcatcctgtaatttgatatttcaggcgtaaaggacagacctccgttataaacttcacaccgcttttctataaggcattccagacggttcagaacctccttttcatttaaaggcggcacaatacggatatcagccagaaactgcgccctgtccggagtcatatttggtgcaattccaccctccgccatggtaacctggagtgtgctgcgtcccagcacagggtgttcctccctcataagctcctctctcaaatccgcaagcaggccaaatccctgctccagggcattgattccctgccagggttctgctccgtggcttgtcttgcctgaaacagatagttttaaccagatacatcctttctgggccacaccagcctgacatgaagtaggctctccaattaaaagcagctttggaaataaatcaggatactcctttatgatttcctttgcgcccaaaccgccacgttcctcatcacaggttcccgcaaaaacaattgttttctgcgggacgcatccgctctccgccagctctcccagaacaaaagccatgactgccaatccgcttttcatatcactggcgcctcttgcataaaggcgtccatcctgttctgcgcacacagccggattggtattccattcgtttatatctccatatgggaccgtatccagatgtccgttaaaaagtatggtctcttctgtttttcctctgagcacgccaatcacattgccgtgatgctcgtcaatcagctgaacccttgtttccataccttttctttttaaatattctgccagataaacagctgtctcctgttccctgtcttttccgttaacactgggtatttccagtatgctcttcaataacgccagagcctctgttcttttctgttcctctgttcttttctctgtttccatctgcaatcctcctgcaaaaagaggactgccgcccatggaatccttgatttcaggcagcagtccccatccttattcttactttgtcagccagttcatgattccctgccacatcctgttataatattcccactcacagaattccggcggtgcccagtgaggggcgcagtccgtggttactacagcgctctttccctttccatattccccaaaggcaataaacggatcatcatctaccacagcggccacaaccgcttccggctttgcaatggtcttgttatatcccagtacctgcgggaactccccgggaatcccgttcagggcttcatgctgaacaactgttacaggtgtagttccctcgcagtgctccatacggtcatccacagtaagcacctctaccggcagaacctcctgcaccgcagtatcatgccattttccttttgcatccacacctgaaaaggtaaggtagcctcccaccatcataagggctcccccatccagcacataatcgcgaatcagattacatctgtttggcttcttctcgcttctcataaatgtggcagagggaagaagaagcgtattggctccaatgtcagagagaattactgcatcatattcctttaattcttccattgtaaacggaaattcctctcctgccagatggttaggcataaaggtaacctcataaccgccttcttccagcgctgctttcagccacttttctccggtctcgtatacagaggtataaaaactgtcaaatcctttcacatgtgtagtgtaactcatccaggactctcctgctaacaatactttcttactcatctctcttctccttattcttcattctatttatttgccttacaccattccagtatgagctgggcataaacgagaatggcttccagatatgattctgcctccacgtactcatttacagcatggcactcttccaaccgtccgggaccaaactgcatggtggggcatcccgcgatattcttccataatcttgaatcacagcctgccggagaaccgaccagacgcacctgtcttccaagggctttttcgtatccatccataaagcaggccacaaagctgtcatcagattcctgttcaaaggcccctccggcctgatacatggttatcaccggcctgtgccggcacagccataagtcgctgtcagccacccggttcaccgcatctgtaaactcctctacaatttgatcatagctcatctgtctgggcagataatggatgcatgtctcgaaataacaatgtcccggcaccgttgaaccggcgctgcctccgtgaatcgtacctatattcagattgggagcaggaagcaggggatgtttataagtcagcagccatttgtgttccagctcctccagctcacggataaccttaaacgccttatcaattgcactgactcccttccactttgctccggaatgattggcttttccctcaaactccactttaaaaaagacaaatcccatatgggccagaatcaattcatcggaagaaggctcacatacaaccactccatcggctttttctcccgacatgattgccgccatagaaccattgcctccgccttcttcatcgcagactgaagtgatatgtacatctcccggcagttttatcccggcatccttaagcagctgcactgccataacagatgccataagtccgcccttcatatcagctgcgccaaggccgtaaagcctgccgtccttcatggttggcgtgtgcggcggcgtattccactcattttcatttcctgccggcatggtatcaatatgaccgttaaacatcaggctcctgccgtctttgtctcctttgaaaacagcatacacattatagcggtcatcgtaattatgtccaatgtttccttcctgatatttggccaggcattctttaatggcttcctctgtcataggatcccggcggatgctatccgctcccatatcctcgaacaatttcaccatatactcctgcccctgcttttccagccctcctgctatcccatggcccaaatcatgggtgtcgatagctataaggtccatcaaacgctgtatatatgcctgtttattttcttccaaaacttcttttagcggcctcataatttcaactcctttttcggtcagacatggttgcggcatttcatcactccattaaccagattaaccgtaattgcggattccctgttcaatgatgtcccagaacttttccacatccacttccactgccacattgctgttgggctccctcttgaaatatccgaagaagtcacaattcgtacggccgtagctctgaacgctgcggatatctatttccgtaaacattgctttcgttgtcaggactgtcgggtctatcaggtatgctatggtcagagggtcatgaagaggtcctccctcccatccgaatacagctttttggctcttgctgaaaaaccgcatcaaatctgcaaacagcattgccggcggcgttcctatcttttccattcgttcaatcacggacgggtaacacagcacttttctggtcacatccagtcccaccatggttatgggcctgttgcacgtgaacaccacatgggccgcgtccgcgtccgccagaatgttaaactctgccgcaggcgtcatatttcccaactgatagcagccgcccataagcacaatctcacgaatcttaggaagaattctcggttccatacgtattgccatggcaatattagtcagcgggcctgtgggtacaagtgtgatatcaccgtccgatgccatcagtgtatctatgatatacagcaccgcatgtttatcttctgcttttttcctgagaggtgcaaataccggtccgtcaagccctgtctctccatgtatgtcatccgcaataacctgcttatcccgtatcataggctgtccgcatcctgcgtacactggaatatccagccccagatattggcacacatttaatgcattggccgttgttttttccaatgtctggtttccggccaccaccgtgatgcccaataaatcaatttgcgggctcttagccgccagcattatggcaaccgcgtcgtcatggcccggatcgcagtctaaaataatcttgcgcttatccatatcttaacctcctgttattcaatcgtaaccagtgaactctttttcttctcctgggcttttttcttggatatcatggaaactgccagtactgtaatggtcaccacgtagggcatcagcaatacaaactgggaaggaacaccatacgcctgtatacgggctcccaatgaatctgtaaatccgaatatcagacagccaaccgctgtaagagcaggatgagctcctccaaaatacatggcggccacacccataaagcctctggaattcgtcataccctctgtaaaaagctggctgtatccaagggacagatgagctcctgccagccctccaatcagaccggatatggctattgcctggtatttcatagcatttacattaatacctgctgtttctgcagccatgggaaactgtcccactgccctcagcctcagtccccatactgtcttataaaaaagaaacatcataagaaataccagcacgataacaaaccattccgtaacactccagttgttaaacaagctgtccaggaccggcacaccgtctaaaaacggcatatgtaccttaggtatgcctttaatctgcgggctggtaaaggagccgcttactccaagcacgctattaagcatgaacttggtaaaggcaatggcaaacagattaatacccataccgatggcacaaatctctgccttgtacttaatgtgtcccacagccataatcatagcaatgagaagccctgccaccattgaaataaggattcccagaacccagcttccagtcagataactaacagttaccgctgtaaatgcccctgtaagcatgataccctcagtaccaatattaagaatatccgcctgctgggtaatagctgcacatagagctgcatatatgatgggcgtagctgaacggaacgtcgcatatattaatgaaatatcaaaaatcttatcaaattgcatatgtcctcctcctactgcgcatctgcttttgccttgcgttttttattaaactggaacagcaattccatggtagccacgataataaagatagctgtaatggtatctacaatggattttggaacacctgtattctgctgcatacccaatgcaccagagcggagcactgccaggaaaaacgcgatgaacggggttgtaaccacattgttcttaacaatcagggaagccagcattccgtttgttcccaggttcgtggcaaagttattcaggaagtatccgtatgtacccagcacctcaatacagcctgccaggccgccaatggcgccgctgagcatcatggtacggataaacaccttcttcggattgattccaacatactcagcattggccggattggttcccacggttctgatcttatagcccagcgttgttttgttcagcatccagatgacagcgatgaccgctgcaatagctataaacagcccagcgttggcattacttggtttcaaaagtttgggaagcgtcacattcaccggtatggactggggattggcaacgcctgcactgattggtccgcttactaaataggaagtgatatacaaagccacactgttcatcagaatggtggtacacacctcgctgacgccgtaatacgcttttaagaatcccggaatccatgcccatgccgcacctgctgcaacggcagccacaaaacatgccactaacagcaaaggctttggaagccatgtacagtagattcccacataggcagctgccataccgcctaagaatacctcgccctcaacacctacattgaaagctcctgccttagccgccactgcaaatgcaatggacgtcaaaagcagcggggtaaagttagccagagttgtaccaattttcaattttcccacaaaggcgcccttaaacaaagccgcatatgcctccagcgggttttcatgaatcagaagtataaaaacagctcctatgcccaatgccagaagagccagcagtaaaatcctcctcaggcttttcatcactgattctacttttggattcattgtctgcctccttcctgctcctgaataccgcagccttccatatcatgaccgcccatcatcagaagtcccagcttttcttcatctgcttcctccgccatcatgcgccctgtaatcctgccctcatacataaccacaatacggtcagacagagacatgatttcttccaggtccgcagataccagaagcactcccaggccctttttcttaacatcctgcaaaatagtgcggatcgattcaatggctcctatatcaacacctcttgtaggctgggatgccaccagaagttttccgcctatggaaacctctctggccaccactaccttctgggcattacctcccgaaagtgatgatgtaggaatctcagtatccctgggacgtatatcaaatttctcggccatctccttggcaaacgggtaggatgcagaatcatttaccatgattcccttggcaaagggagctttgtcctcctgaactgccaccagattctcccgtattgtcatggtacggtttaaacctctggtatttcggtcttccggtatatgggcaagtccggcttctctggatttctttggagaaaaattagttatttccgttcctcccagaataacacatcccttctccacctttctcaatccggttatagcctctataaactcactctggccatttccatcaataccggcaatacccacgatttcccctgccctgacttccatagagacaccgcgtatcttggatatctctttttcacccgatgtccacaaatctttaacttccaggaccacatcaccgatatcagccttttcctttttaatatccaggaaaacttcccttcctatcatcatcctggctaaatctgaaggggacgtatcctgtttatctacggtaccgataaaacatccctgcctcattacggtaatacggtccgatatctccattacctcattgagtttatgagagatgaaaacaatggacttgccatcctttctcaaattctccagaatctcaaaaagtctgcgtgtttcctgaggcgtcagcacagctgtcggttcatccagtatgattacatctgctcccctggtcaatattttaatgatctccactctctgggcttctcccacggaaatctgatttattttcttactcatctgtatatccatgccgtactggtctatatagtgctgcactgtattttttgctttatcaaaatctatggtgcatccctttctgggttcaaatcccagaataatattctccagtactgtaagctcgcttaccagcatgaattcctggtgcaccatgcctattcctttttctatggcaatcttgggggtgatgtggctcatattctcgcctttgatttttatatctcccccgtcaaaatcatatagtccgtacagcagtttcatcatggtggattttcctgttccgttttcaccaatcagggagtgtatttcacccttcttcaagttgaactgcccatcttttaccgcctgtacggagccaaatgatttcctgatattattcatttccactacatatccgttcattccggtcacctttttccctgaatctttgcctctaaagatttcataaaacccggggcgggaagacatatccatgtcctgccgccccttaagtatctccgcgctttatactgccttactgagcgtccttaccgaatccctcatagttatttaccacaatctcaccagaaatgattttatctttcagttcctgcaccttgtcctggatatcagcagggaacttatcacctaagtgctctttaatgactgcgaaatcagttaaatccacaccgtcattggaaacttccagatagctggtggtatctcctttgaagttaccctccactacggactcaatcacgctgtagcaggcagtgtcaactcgtttaaccatggatgtcactacgtgtcccggctggtcgttatcctgatttaaatcaacgccaatcgcatattttccagcttccttggccgcctccagaacacctgtacctgtaccagaagccacattcatgacaatgtcagcaccctgttcatactgcgccaatgtcagctccttgcccttaagagggtcaatccatgttcctgcgtaagactgaagaatggtaatgtcgggattaatatactttgctccctgctcaaatccaacatagaaatcgtgaagcaccggaatgtcctggcctccgacccagcctataatagcatcgtcatttaccccttcaatctcggagtgggtcgtgaacatagctgccactgcaccggctaaaaatgaaccctgattctgagcaaagctgatggaaaccacatttggtccttttacagttgtatcaatgatagcaaatttaacgtcaggatagctgtctttatatttctcaagatattcctggaaattagagttagagcagatgaccaaatcatatccgccctcgcagcatgccagaaggttggcttcccactcgtctgcggtagtgccttccaggttctttacctccacgccaaaatccttggctgcctgctgtgcacctgcattacaggaatcattgtaggatttgtctcccagattaccagagtaaacaacagctacctttatgggacttttgccctcagaatctgctgcctcgccggagccctccgctgcagtctgcccgctgtccgctttgctctctgccttagctcctgtgctgctggaaccacaccccaccagacttaatcctaatactgccgccatcgtcattgccaaaaaacgtttcttcataataaaactactccttccttcacctaaaatataattgtttccttttaccaggaaaaagcttttagtaaagcgtttttccaaatttatttcgtgatttaatcttattactattttttaattttgtcaatacataaatattgcactatattaaaaacatatttttatgcattatttacagtttttatatgtgttctgcccttatgttctgattgatattttcttcgatggtaaaaggctttatcttccctgatgctgtaaatcccagtcagatatcacaacattttcaacgccgcacacaaccgatggttcgttctgaccgccaaataagaaaatggcaggagatgggcgcttcccgcaccgctatatctcctgccatatccgctctatatttttttcccatccccatacaaattcctatactgccccggcgtcatattctccgaactcttaaacctccttgtaaagttggacagattggcatatccagcctcctgggcaatctgggctatctgcttatctgtgtgaatcagacaatccttggtgtaatccagacgttttttggatatcagttcggagaaactggtattcaggttctgggttatgaatttactcatatagctggatgaatagccaaagtgttccgccattcccaccaggcagagactgctgtccctgtaattatcttctatgtatacaagcacctgcttaactaaatcattgcgggtgtcctgcctggaggccgcaaggacaccattgattctcataagagcatctcccagcttttcaccgaattcttccacagtcctgaacgcggtcagctggtacagttccttctccgtcagccggatgtcatttttcttcacttccttcaggagatggcttacgatatcataacagcacatcagcgccatctgtcccggaagctcctccaggctcagcaccacttcctgcacagagccctccaccccctccggcgaaccgctttccagacaccggctgatacacaagagacattcggtctgatagcggctgatggtagcgctgtactcctcaccctttccctgctccaggttctcaaaatccagctctttgtggggatttaacaaacggaacttcatgttggtaagggcctccagataggacagatgcacacctgacgcatcctcatgaatatttcctgcggaaatgacgcactcgcaactgccgaatatctccttcaaacgctccctggccccaatcctgtgttcctcagtcaggaccttgcggctgagaatgacggcaattgcgccgaaatagtacaggaaacttgtatacacgccgtaatccgtctgaaatctctcttttatgggaccttccttttctttgtacaaagcggataactccctggaagacatgtttcctccggccgccagaatcaccatatgattccgccccttcatctgctccgttagaatgccgttcaccatgtcgtcctcccgggtaccgtcctcccgggtgtcgtcctccccatagagcagctttgtcacaagccgttcctccaccaggggccactgcttttcaatctcctttgcaagggaatccctgacagaattcaggctgtcatactgatgctttataaataccagctcgtccctgctcctttcctcactgttttcattgtcctgtttcatatattgagccagctggtgtataggcttgtaataatggtaggccatgtagattgccataaagcatcccaggattaaaaagagtaaaactccggtgaccagcaggctgttattctgtaccacatctgccagcaggtcgggcatggttatcttactcaatatgataagagagggatggtccataggatatacgatataacggccctgtcccgctctctcctgaaaggtggtacagcttcccggctctgcctccaggacccgtcccatcacctcatccagccccagatcctccccttctgttgccagtatctttccctctccgttcagcacagcgattccatggctgtagctacccggggacgtggtcatactctggctgattttggagggctgcagttccagcaccacccaggattcaaccttaaaggaataattatataccggataaatgaataccatctgcggtcttgttatgattccgtccttcatgtggtactccttgttgataacatcgtacccgggatggtccatattatacagtttttccaggaatggctgcctttcttcctccggcagcctcagctggcccgccagaagaatatccttggcataccgcccttgggaagaaaaactcatatctccattttcgtagaggatatacgcctttgttatgtaaggattggctgcattctcctcgcgcagcatgtccaccatctgaatctggttttgggcatcccggcttctggataccacagggccgctgaagctgattcggttcccggcctccataaggcggccgttcatggttaccaaatcatctcccagacgctccagaatattttcattgtacccaagaatctccctggacagattacggtacataataatttgtaaacaaatagaaagtaccaccataggcaccagaaaaaaagatgtaaaacccaacaaatatttatgaaaaatgcctctgcgcaaatctgtacctccccgccgtatatggttgtgcacatgccatttttacattatatattattttgtggtgattggaaagaagttaaatgggaagagcatatgttccattaaatggaagcgcatatctgccggacaggaaggaacacgcctgccgcattatatttatcagcaaaacagcaggaaaacgcgttcagatgcttacccgcgttttcctgccgttatccatacctatatgattccataatcccgccgccccgaaccccatcctgtacctgttccggaaacagccttacaccgaaacgcaaaacctgtcttatatccgcgccataacttcatttaaatccaatgttccggtaccgtcctccagttcaaaatacggtatgccgattcctcctgcccggcgcacagattcatacatctcattctgttcccggactgccagatactgcttcaaatccggaaggctggcagacaggttcttaaaatcaatgtccgcctgcttctctgtcagtttacataatgcatacagtgtgtcaggacataaatgacttcctataacagttactttcatactataaatctccttttctatcatatgattctatttggtttctgctatagcggcttgtgccgcggcagtatttcccatggaattttctttgtaaatctgtttttccagccagtcttttccttccaccagcctggtcaccatcatggaagcaatggtatcgccgctggcattaaggcaggttgcggccgggtccaccagaaatcctatggtggcaatcagcgggaaggcttctgccggaaagccgaagaggctgacaataagcatttctcccaccaggccgcccccgggagcaccggacagcacaaaggcgctcaggatagcaaccgccatggccatggcataggtaccgattccggtaaaggactggccgaatataccaaacagaaaacttatcttcactatggaggagagcacggaaccatccatatgcatggtcgcccccatgggcagcacaatatcccggatgtcccttggcacccctatcttgtcacacgcctcgcagtttacaggcagggcggcaatggagctctgagtggcaaatgcagtgaccgcaggattcagtatatgtttgaacatacgcctcactccctctcttcctcctgcgaaataagaatatgccggaaatgctgccatgaaataaacaatgcacatgggataatataccagcatggcatgtccgtagtctccgatcagtcccgggccgaactctcccaccagggatgcaaaatacgctcccagtccaatcggcgcgtacagcatgataatactcacgattttcatgataattgaattcaggttattgagcatccttcccacaggactgtcctcacctccgcaggcgctgacgcagaaaccggacaaaatggcgaatacaatgataggcagcatgttcttcctgctcataagccctgaaaaatcgtcaaccgtcagtgcgcctaccaccatttccccgattccgctcatttcctccatctcagcgccggcaaaatggatgctggtgcctgccgccggcggaaatacatttactaccaccagcaccaggacacctgcgatggcaccggtaatcacaaataccatcaccagactgctcagtatcttccccagccgtttcatgttcaccatgttccccactgcgctggatatggaaacaaaaaccattggaaccacaatcgtaaacatcaggttcagaaaaatatctcccaggggagccagaacctttgccttttcgccaaatatcaccccgatgacggcgccaatcatgatgcctgataataaaataattggaaaacggtaatttttccatatttctgatttgttcatcccttacttcctccttctcctttggcgcagcccggtctacagacgatccactgcgttctttaactgtcccagggctctctccagtacacttcttgggcaggcggcattcagcctcatgtaaccggacaggctccgtccgaaggtatacccctcattcagtcccaaaccggccttctcgatcataaaggtacgcagggtctcattatccatattcagttcacggcagtccagccacacaagataagtggcatccggtaccgtaggcctgattttgggtatattggcgctgcagtattcccttatgaaggtaaagttcccatccagatacgcaagcagctgttccagccactcttccccctcattaaacgctgcctccattgccacggaactgaacgcgttatttctgtggatatccatagccatccagaagtcatcaaatttcttcttcatctccagattgggaaaaattgtggtagatgcctgaagccccgccaggttgaaggtctttgtaccggaaatacagctgattacccttccggccgtctccgcggacaatgtggcggttggaatatgtttttttccatggaataccaggtcagaatgtatctcgtcggaaaccagcagagtgttgttggccatacagatatctgccattctggtcagctcctccctgctccatacaattcccagtggattgtgggggctgcacaaaaggaatatcctggcttccttagccttggcttcaaaatcctcgaagtcaattccccatgcatcgtccttttccaccagtcggttttccagcacattccgtccccacgcctctgttacatcgtagaattccgagtacacaggcgtctgaatcatgatgctgtcacccggttctgaaaacagctttacaatggatgacagggccggcaccactcccaggctccagctcatcatctccttttttatatcccatccgttgcgccgcttctgccagccccggatcgcctcaaagtaggaatccggcctggaggtatatccccagatcccctcttcggccctctccttaagggcgtctatgatgggctcagctgtcctgaaatccatatcggccacccataagggaatcacatcctccctgccgaatttcttcatcctttcatcatacttggctgccctgttgtggctcctgtcaatgacttcgtcaaaattatacttcatgtcatataccgcctttctttcattgtttatgctggctgtgcttttcctcagctgcttgtgcttttacgcatctggctgtgcttttccgcatctgcctatttaataagcaagcatcatgccaacttttacaatcatattgaaatcaacgcaaaaaaaggacttgattccttattaaatcaaatccttttccgctgtatttaaattattccccaaaccaaatcaaatggttatattggccgctaattggttgtgtttttttatttttggttgataatatggtttatttggttaaattcatatccttcccatatcttcctgcccagggatgttatacggcttccgcctcttccccgtccaaccctggccaggccatattccctgaatattcccaggatagacctgacggccggctgggagagaaggagcttttcttttctggcagcttccagaatccgctcccgtcccactgtctctccattttcagaggaacagtataacatttttagtacaaaccagtattcctccggttccagcccctgttcccgcattgcctgtttccacggtgcggtatcaggctgcaaaaccggttccggatattccgcctttttggacacgcagtacgataatcctgtcccaatcccatcatactgaaatgtggggggcaaatcctttacagtgatgacctggctgcctgtaaagcaaaagtactccgccaggttgcgcagttcccggatattccccggccagctgtacgtgcggaaaatcttctttacctcctctgagagcacaaactctcccttcagctcccggcagaaccgttccatgagaaggaatacatcctcccccctccggcacaggggaggaatgaggaccggcagtgtgttcagacggtaatacaggtcccgccggaagctgccgtcacgcaccttttcttccagggattcattggtggctgccacgatacgtacatccacgctgataatcttattgccgcccacccgcatgatttcatgctcctgaagcacccgaagcaattttacctggagggccggactcatgccctccacctcatccagaaacaaggtgccgtgatgggcgaattcaaacagccctggtcttccgccttttttggccccggtaaacgcgccctcctcatacccgaaaagctcgctttccagcagattttccggcatagccccgcagtttatggccacaaacggccccttttccctcctggaagccagatgcactgcgttggcaaacaactccttgccagtgcctgtctcaccaattaagagtaccggtgattccgtgtaggccatgcgccttaaaatagcctttgtcctcaatatctccccggacaccccaatcacatcctcaaaggtgtacttggcccggtaccccttgtgcatcagctggttgcgcagctcatgctggcggttctcagcatcattaaagggctgcaggatggcaaacgcgccgatgcagtcctccctgcgcagcactggaaccactgtgacgcctacattcacattgttgatgcggattaccctgggctctatcttctcttttgtcttaaggcactcaataaatggcaaataggccagggaggcagatgcctgcttatgcatcaccagcgtgcggctcagccccgtaatcgtttccgccttcctgttcatggcaaatatctcggcccgctcattgataccgatgattccctcgtccaatatctccatcagtatgtcaaactggctttccagccttctggacctggcgaacatcatgtcaaaattgtaggtgctggtgaccacacttgaaaaatatgcctggaacttaggcgtctccaacagttcctccaggcccagttttaacgctgcctcaatcatggtctccgaagtcagacagcgctgtcctatgttgaccacctgcttcacgctgtccgggacataccgttcttcgtccggagtgacagccaggccaatgccctccaccggctccgctcccggataaaagggtataaattcaatgtggttcacccccagctggttcaaacccgatgtggcttcccggaccattttctccgtcatattcacaaacagagccctggttccggcaggaatggtccgcagcagccgtatggtttcccatagataggtcacgtgaatctcgctgatctgcgcttcaatggggatgtactggggcacatcctcccggttgtcaaatgcgtctgttgacatgagatacagatccgcccgctccatattggaaatcgttccttctctcacactgtatgaattcaccttcacgtattccccgaacagctcctgcacctgttttccgtaaaatgcgctggctcttgggtccagggcaatgaccgccacctttttaaccattttatccctccatttcaaccattaaaaccattataagaccaaaaccggcctttctgcaagctgaattttcaggcatgaatcttgcttgtaatgagagatagataggatttgcgctgaacgccctgtcattcgtcagggctgcatggtgcgggaattgcaaaggaggaacatcatgaataaagaagaattgattgcattgttaaagcaggaggtattgcctgccctgggctgtactgagccagtgtgtgtggccctggccgcagcagatgccgcaaaggctgccggaggaaccattctgtccgtcagggtagaaatgaatccaggcatctataagaacggtatgaatgtaggtattcccggttttgaccgggtgggactcaaatatgccgctgccctgggcgcctgcctggccaatcctcagaaaggacttaaactcctggaggacctttcccctgctgtcagcagccaggccataaacctggtggaatccggaatggtcacacttaagctcaaggaggacgagcccctgctctatgcccatgcagaagcagtgtcctctgccggtacaggagccagcacaataagaaatacccattccaatattgtctgtaccgcccggacagtaaacggagttctcacgcctttctttcagaaggaatactcccttaccggcaggacggctctccatgaaaagctggcctccatgaccatttcgcagattgtatcgctggtcgaaagctgttccccggaggaactggccttcatggaagacggagcccggatgaactctgccctggccgattacggcatgcagcacaaacttggcatcggagccgcctcctccctggcaaaatactgccggaccgatattgtgggaaactcccttatgagccgtattatgacccttatggccagcagcgcggaaggccgcatgtgcggctgtccctatgcagtcatgagcagcgcaggcagcggcaaccacggccttaccaccattctgcctgtagtggaaacagcccggtatcttggctctgacaaagaacatctggtaaaggcgctggccatatcccattccatcaatgtgtacatcaaggaattcaccggcaagctgtccgccacctgcggatgcggtgtctccgctgcttctgccgcctctgcttccatggtctggctcatgggcggcagccatgaacagatgggatatgccatcatcaatatgagcggcaacctgaccggcatgatatgtgacggcggaaaaatcggatgtgccttaaaactggctacagccagcggggcagcccttatgagcgcctgtctggccgtggacaaaactgtgctggatccaaaggacggcatatgccacgccacaccggagggcgccatccgcaatatgggacgaatcagcaatcccggcatggcgcagacagaccgcaccattctggaaatcatgatggagaaagattaatccgccctttagtccaccagcttatccagttccttcacatgttctgtctcattggaggttttatgctttgccttggatgcgtacaggttcacggatgcctgggacttcttaataggctgcatggttcctgctccggccacacatccgcccggacacgccattccctccagaaggtagccattgtatttcccggcctttgccatggtcagcagttttctgcattccttaaggccctctgcattggctaccttgatttccttatccggataacgctcatgaatcacatccactacggacttggccaccccgcctgccaccgcaaagttacggccgtccatggaagcgtcattgacgccttccggatcttcttctatcttctccacgtccacatgccgggcgtcaaagatgccgtccatttcttcaaaggtaagaacgaaatccacatcgcttcgtatgtccgtacgcatggcctccagcttcttggctgcgcagggaccgatgaatacaacctttgcattagaatggtgccgcttaatcagccttgccgtcagggtcatgggggtcaatgccatggaaatacagtccgcatgctccgggaacagcttcttagccatcatggaccaggccgggcagcaggatgtagccataaagggaagcttttccggcacttcctggataaagtcaattgcctcctgggtagcgcacaggtcggctcccaccgccacctcaaaaacgtccgcaaaccccagcgccttcatggctgcacgcagcttgccgggcgtcacctttggtccgaactgccccacaaaagccggggcaactgccgcataaaccctttcccctgactggatggcccgtataacctggaatatctgcgatttatccgctatggctccaaaggggcagttcaccagacacattccgcaggatacgcatttatcgtaatcaatatccgcctttccattctcatccgtggaaatggcgtccataccgcaggcagcggcgcagggtctttcctggataatgatggccttataggaacaaacatccgcgcaccttccgcatttgatgcatttgtcgtcattgatgtgggagcgtccattggtcctgtccagcttgatggcatccttagggcacacctcctcacatggatgggccagacagccctggcagccgtctgttacaaatacacgcttttcatgacaggcattgcaggcaaatttaatcacattaatcaggggaggcgtataataagtctccggtctgtccgcagcctctatgttatccgaaaccggcgcatgttccgccgcgctgcggtacggaagccccatggccaatctgagccgttccccgacaatagcccgttccaaaaaaacgtcattgcggaaattccccacttctcccggtatgattttatacggaagctcttcaatacgtttatccaccggccattccgtatgataggccatccttgccacttccctgaatatcctgtgtctgatttcctgtatacgtgtctccactcctcgcatattcctgcctccttgttatgagcacttagagaccgtcctttggtctcttacgtgcgatacattccgctggcacttggcgggcgtcctttgaccgcttagtgcagcggttcgttatgagcacttagtgacccgtcctttggtctcttacgtgcgatacattccgcttttaacagtaccgattatataccagcccatgaaaaatgcaaatgcctaaatgcatttttccccttttgttcttaaaataaagcacggaccgcagacaaaaacaggcgtccggccgtttttttccggccgcgcgcctgttcatacgttaccattttaccagtctcagcacctcttccgccaatacagactatacaagccttgaccgcagtataccttatccgcctttttccatgtaatatcacaggtcatacacaaaatgcggaaccggacggccgtccacaggggaccgtgtttccccgtcccggaccgcgcccatttttctgtaaaatcccactgcctgggggctggtaacaaaatgaatgcggcatatttcctgttttccgcaccagccggtcatatgctcccacatctgttttcccagtcccctccccagcctttcctctgccacataaaaatactctaattcccatgcatctctatcctgcctgattccccagaaggcagccggacagccgcgttcacctgccgcatacacaggattacggcggataaaatctatcgtaacattaaaccctgcgtcaaagttttccataaacacctcatcatatccccaatgtgcctccgaagccctggcaagccggcgcagcgcctccgtatcttcgggctcagccctggcaaacctcagagcctgccttttatatcggccgggataaagattctttgcctccctggtaaatctttccaccacagcttttttctgctccgtatacccatcccggtcatgttcatattctttccagagtcccagcttcagctcctcatattccctggctgcttccggatgctccctcagataatccctaaaatacagctcgtcgttatcccccgcctctctcagatgcagatggaataccttctccgcaaatcccgacggcgtgtaacccctgttgaacgaaatcctccctgccttttccatcatgcagatgtagccgcccccgataatgtgttccttcatggcctgcatatccccgccttccctcatttccaccaggatatccactatgggcttggcccagatggatgggatggatgtgcttcccacatgactgatttcgcagatatcctccatgggaaggataccaaacagccgctccctttcctcctggtaccactgcgtccagaccggcctgtgctctgtgaggaaaacagggaacagctgccacagttcctccaggctcatgccggaaaacgggtcctgtctatccttcatcatcatatctctccatttttttctcccattcctcctttacccctttcatcctgcggaaataagagctcatctcatccgccatgcctgacagacggtttaggagcgtggagaaatcctttaacatttcatcgtcctggaaataggggtatacgatatcatggtcaatctcactccagccctcctcgaacagggttcttccctggatctccacataatatcccttatatttgatgatatagtggagggagcggtatataccgttggacttaatctcaatcaaattctcgtcataaatcctggtgtccccgtttctgcggtagacctttggccgttccgcgatgtaataatgcccggtgtcctcatcaaaatcctttatgcggtccaccacatatagatcagggttattctcaaatacactggttatatatttgtggaaatgaatccaatcctcccggtaaaggaaaaacacacgaattccaatcaggtccgtgatgtacttatggtaattgcttctgtttatatcctcaaaccgttcaaaatgctcgttgcgcttgcgtatgattttctctatcagatggccgggatccttagtgcggtaccggtaggaatggatgcctgccctctcaatatcatagagataatcgtacacaaaatccttaccaacgctgcgcagttttccctcaacagacaaatagtcatcatagatggccgccagctcctcccagtccagtccggccgccttaagttcctcaggttcaatgttgtagcttgttaaaaatttttccttgtcaatcatccggtatcattcctcctgtgtctaaaatgtctgcatatccttactgacgccgtactttatccgtcaatggggcttcatcaccaacgctctttcatccactgcccgcagggttgccagtattccgtccaggtgatcgtactcatgctgaatcagttccgacatatcccctttcagttccatggagcaatcgttccattccaggtctttataatatatgatgcaccgtttataccgctttacccttaccagcaggtcaggaaacgacatacaatcatccagcacgtctatcatttcctgttctggaaaggcaagccggggattgataaacagcaccggcgtgtccagatgacggtaaataacacgtttcttcaccccaatctggggcgccgcaatggcccttcccactccatagcgggccctaaatgccaacagagtatcctttaaatcctccctcacctgttccatctgatgaagctcttctattttcacttcctgactggcctcatataattcaggatttcccaataacagaatggtccgttccacctcaaagcctccctctgcgctgttttcgttcccgtacaacgcgttttcctaagtatatcatgattccatccgatttccaaatcccaattaaagggtaaggcaaaaaaatccggaccgtctcctcagtcgagacagtccgggtctgtatgcctttttagatattacgcctgggggaactcaatcagattcagtccgatggattcactcatccttctgcctgcggttccgtcaatcactgtaatgaaaatctcagcggtggcgctgataaccgccctgttcaaatggcctccgtggcactctcccaccagcggattgccgattaccatgtgcagatgaagataggggttttctccctgctgtgtaatgttgcctgtaagggaggcaatttcatagattcccttgaaggactttccataatacttcttctccgttgtatcaaataccccgagttccacctcacaagcagctcccagcccggaaacctctcccagagccaccttttctgttctgcacacttcccggatacactctgtcacttcctcgcccggattcaggcggagaatgattttttgtccaaatcgcttatattccatggtattgactcctttcaaacacagtttacaatacatttaaccattatatattcatgtatgtaagatgtaaaattatattttctatggtctgctctaattttttgttatgattggctatgtctgagtttcaaaaatattccttgggattctcccacattaaaattcacatccccgtcctcccttcccattgtcaaatcccctttacaggtatataattatactaacagtttttttatactatacgcctataaagatactcaggaggtgatacagaatggataacgcaataaaaacacctgattgtcccgtggaaatgaccctgcagcttatcggcgataaatggaaggttctcatcatccgggatttgctcacagggacaaaacggttcaacgagctcatgcggtcagtgaacggcataacccagaaagtcctgaccagccacctcagggccatggaacaggcaggcctgattacccgcaaaatatatccccaggtccccccgaaggtggaatataccctgaccgaaacagggtacagcctgaaacccatactggactccatggtagcctggggaacggattacaaaaagaacataggacaaatgtaaacgcacaaagagccgtgcccccggtttctctcaaatccggggaccatggctcttatatgatccttatgtgaaattactatgatattatccctgtgcagccggctccagtcctaaaaaaaccgctgtgtcctgaagcgccttcataccgtcaagacgccctaaatcatacatttgctgtatcttctccggtctgttttctgtccggctgattttaataagacggctgggacgtatgacaaagatttccccggcagactccatgcgtctgacctcctccagttcccggttatacatcagatggcggcactccatggtttttataaattcggggtatctgcggtataccctgcggatagcggggagcatttggtttggctttttgcggtaaccatccggccgggtaagtatgaccaggcttcttttaaagcccattttgcggaatgcagctacgggaatggagtcggatacgcctccgtccagcagcttctgtccgtctatctccacaatcctggaaaccagaggcatggaggcggatgccctgatccattgtatgttctcccccctcaggctgccgcatctgtggtataccggcctgccggtttccacatctgtgcaggtggcataaaactccatgggcgaagcctcaaaggcgtcattgtcaaatgggtccagccgctccggcagttcgtgataacagaactcatttcccaccagatcgccggtcattaccaacgaccggaaactcatataccgcgggtcgcggcagtacttcagattatagcgtatggagcgccctgcctgtcccgccacaaaactgcacccatggatggctcctgccgaaactcctaccagaccgtctgccttaatcccatgttccaataatacgtccaatacgccggcggcgtaaatgccccgcattccgccgccttccacaacaattccagttttcatttccatctacctctttacaggcgtattttaggaattagttcttacctcatcccactggccatggcctgtcagccagttcagagccttgtgccactcccttaccaccccggtcttcatgcccacaggctccggcaattcatggcgtctggcattgatgcaggaccattccagacaggaaataaggtcgcaggcatccaacagctctctggggctcttaggcctggactttgccatgattttactgatactggtgccatttctcagtagctttaccaaatcagcgggattgcagggatgatccgggaatcccagctcctccaccagtcccagcgcccattctaccacatgaagggattcatactgccttaagaaagacaggatttccttcctgtcgggagccgtatcgtgcagatacttccactcctttggagagaaataatcctgggtattgttattatcaatataatccatcaggaaattctgtgccttttccatgccctgtttttcatccagaaggcattccgaataaatggcaacgcccataatggccagtgccctctgagcagtctcctccagggaggggcaggttatctgtgaagcaggcgcaactgcgggcagccatcctggtacatagattgcatttccgataagcgtctgcatggtgcgcatcctgcggtccacctgctcctgggtgatatcctttccggcctttaagtccggctcctgatagggaagatagcgggtaaaggcgcttccgcccttgtcggacagaatcagtagcttttccccattttccccgctgcagaacatgccgtcctctttctcatcctggttctgaatcaggataattccctccagatcgtttaaaatggacacgaacatatcctcaatcatggtcttcttgtcctcaatatcctcttcgtcctccacgtcaaaggcatattccaccagcacaaaacttctggcccgtccaatctggtacagcaggttggtcttaacatccacaacccctgttttaacctgataaaaatggtcgcaggttccctccacctgtctctttataaactcctccgccttttcaccggcagactcgctggccactgccagacggatttctatatctccgttatgcagtacaagggtatctccctttccctccgggtccaagccaaaggttgtacacaaaacctgaatgattttttcctgtgacgggatatctgagaaaatgaaggacttgccttcatatcgctttgctggggctgatgtctctgctgcattcttttcttcaaacaattccatataaatctccttcttaaattacgccgtataaaacagtttgattatactatgtttggtgggaaaacacaaattattccttatattttctactatttcccttcaaaataatccgaagccaccatcccatagatacactcatcgcatatcccctgattattccacccataccggcggagggtgccctccttcttaagcccgcaggccgccataacctttccgctgttcacattgcgtgtatcgtgcagggcctccacgcggttggcaccctccacctcgaaaaagaaccgaatcagttccgcaaatgcctccttcataattttgtggccccaccaattcctgcccaggcagtatcccaccgtcacacggcccgccttctggttaagctgcggaacagaaatgcttccgatgatatttccctcgtcttccttccgcgctatggcccaggtgtaaaaatccttagactcgtatgacttaatccatccctccagaatttgctttgtctcctccacatccttgtgaggttcccaggagaggtatttcgtgacctggggatcgtttgcccagtttctaaacatggcgtcagcgtcctctatcacataagggcgcagcaccagccgctttgtctccattcttacggttccggaattcttcatgaggttcctctcctttcctgcacatacaaaggatgtgcgcagcatgattgactggcagcaaaatattattctctaatatagcacacatcccgcattttaggaacccttgatattctaaattattttatatagccatgctctctgccgcttgctccatccactacttgctccatccaccgctctctccatccaccgcttactccatcccgaaatacacctttaatgccctccccataaactccgatgcaccttccccgtatttcctgtctgttatttcctgaaacgcaggattcgtcatataattattgaccatgaaggaccagtagctgctgcccatatccattcctccattgctttcattgataagtgataccagttcaccggctatcttctgtacttcgtccgaaccggcttccttactcaaatccgcggtaagcttctttgtcagcatatccgttttatccacggcctcatctgcctctttctgtgtgaacccaggtccattttccagaaaatgctgcagattttcctccatcgcctttgtgaatttctcaatgctgccatattgttttactgccatctgtgctatgtggccttcgttggcctttaactcagaaatcatttcgtcaaagctctccatactgccaagctgctttatgatttcttccatatgtgtccttttataatctgttagaacctgaaaataattgctcatatcaaattccttgaaatccaaagttctctctccttttataagtctgtccaacagctccagcagcgcgtttaacctgtccctcttaatccgaatcagttcccgctgtttttcaaatgcatccttcctgtcatacaaaggacttgccataacagcctttatttcctttaatgtgaaatccagctccttaaaaaacagtatctgctgcagctctgccactgcattttcatcatacatcctgtatcctgcttcggtcacctgagcgggcttaagcagaccaatttcatcataaaactgcaatgtcctaacactgacaccagtcagggaagacatctgtttcactgtcatcataccaatcatccttctttcaatttcagagcttccgcctatgattatctgccggcagcggaatatccgcatcagctttatctcttaccactactgtacactatcacgttacgtaagagtcaatactttttaaataaaaaattcttacatgcaaaaaggagcttcccaaaagcattgtccccgacataacgcatgtccggtcctgattctgcctcccgaaaacccctttccagcagtaactggcatttcgttgtatgcatccctctgctgccgctgattttccacagccgcctttatgcaagttcctccatcagttcttcctgcagctcctggttcaccaatttcatgtcaccctcaaacaccttgggatatggaaatgccatgtccccgtataacttgccgaatgccacgtagaccttcttccccttcagcgcaaatatagtccctatgccatagcgcttatgctccaccttttgattcataattctcatgttatccgactcctttctttaaaacctttctcttaacctctcttccggccgtactttcagcctttcttccgtccttacttccgttcttactttcttccttactttcgtccttatttctaatcctcttctaaataacctttgccatcttttcccttgccagccgttcccttgccgctttccttcttttctttaacaattccgtctgctcctgtttcctttttgcctcatataactgataaaccacaagacgctgttttgcttcttccgtccgcttcttctttaattccatgaccgcggcttctgcccgcttctgaaggattggatcgtcaaaacaaagaaatcgctcaaaggcatcgggatacggaaatacctttctcccggcttcaccatcaaacagaaccaccatatggttctgtaccacctccgccactcttccagtcccatatctgacatgtttcacggattcatttttcatcttctcaccttcctgcaaaagcgttgactgttccctgctcatcatccattgagctcattgagctgcttcatccgtattcttccggattatctcagtcattattttaccattttcccaaaacaaatttcaaaggagaactttctcctcaaaaaaactttgtgagttctgtgcagagggaacctctctgtttttgtatacttttcccgcgttccatcagcctgtttctgcaagcggaattaacctgttacgcaaaaaatgccctccggctgcatgatatgccggaaagcattttccataaaacttattttcaagtccaatctttattccatccctgcaaaaaatcactccactcccgcttttttgcaaatatcattgagacagcatgcctcacagcggggttttgtcctggctgtacagacgtcccggccatggaataccaatctgtggcagaaatcgctgccctcctcaggcggcacaagcttccacagtaccatttccaccttctttggctccttgattccgtccaccaggcccatacggttcaccaggcggatacagtgtgtgtccgtcacaatggcaggctttccgaacacatcccccataatcaggtttgcgctctttcttcccactccgggaagctttaacagggcgtcaaagtcatcgggcaccttgcctccatactgttccttcaatatcttcatgcaggcgcttatgtccctggccttgctgtgtcccaggccgcagggcttcactatccgctcaatatcttccacatccgcctctgccagggcatccacatccggatatttggcgtaaaggtcctcaaccaccacgttcactcttgcgtctgtacactgtgccgccaggcgtacactgaccagcagcttccaggcatggtcatagtccagggtacagcctgcatcgggatattcttttttcaggcggtctatgatttccaatgcaagtttttcctttgtcatattgtatctcctttgtatgctgcagcgcacttctttttaacttccttttaacttctttttacttctttgtatcatcctgcgcttttcttttcacatacatcttattatacatgacacaggttcatttctcaaggaaaataccctggagcagacttaaagacaacggctccggggtattttattccatccaatatgaaacttgttcacacatgattatttaacaataaacgactttctcttactcaccacatcaaagataaccgctgccagcagaacgccgccctttaccaccttctgcaggttttggtccacgcccatgatgctcatacccagattcagcacgcccataagagttgcgcccacaataaccccggggaccgtaccggtgccgccgtatgcggaagcgccgccgatgaagcacgcgccgatggcgtccatctcatagctgtttccggccgtggggttggcggagttcagtctggctaccgtgaccatgcccgcgatggctgccagaaggcccatgtttaagtaggccaggaaatatacccggttggtattgataccggaaagcttggttgccttctcattgccgcccacagcatagaagtaacggcctgtggtggtcttggaggcaatatagctgtagattccgatgataaccgctacccagataagagcgtttggaattcccttgtactgggccaggcggaacatgaaggagagcaggacaacgcagatgactgccattttgatcacaactcccgtaagaggctccacatagtaccccttagccagcttctgccgccttccattgaaaacaataaaggcatagacaacacaggcaataactcccaccaggaagcaggtcaggttaaagccctccacagcaaagaaatccggcacataggtattgaacagcaccagaaactggtccggtatgggagccagcgtcattccctgaagcaccacgttggaaagtcccctgaacatcagcatgccggccagggtaacgataaacggaggaatcctgacataggcaatccagaatccctgccatgctcccactaacattcccatgatggccatggcgataagtgtaaggtaagggctgatgcccatttccaccatcatcttgcctccgatggcgcccacgaagcataccacggaaccaaccgacaggtcgatgttgcctccggtcagaatacagaacagcatgccggtggccaggataaatacataggcattctgggcaatcaggttgtttacgttctgaggaagaagcatcttgcctcccgtgttcacggtaaacagtatgacgataaccgcaagagcgataatcattgtatattttttcagaacctctgagattttcagcttttgatccatggtctactctcctttatcagctttaagaatacaggacataatatattcctgggtagcttccgaagcgtccacttccccggccagcctgccctcattcatgatataaatgcggtctgacatgcccagcacctcgggcagctccgacgatatcatgatgacggacttcccttcctccaccagacggtttatgatacagtatatctcatactttgcgcctacgtcgattccccttgtgggctcatccagaatcagaacatccggctccgtaaacatccattttgccagaagcaccttctgctggttgccgccgcttagatttcctgcgttctgttccactccaggacattttgtcttcagcttatccttgtactccacagccaccatgtattctttgtccttgtctatgactccatggctgctgaccgctcccatgttagcaagggtggtgtttacacgtatgggattggacaggataaggccgtttcccttcctgtcctcggtcacatatgcgatcttatggctgatggcgtcgtgcaccgtattcagatggacttcttttccctcaataaaaagctgtcccgaaatattggtaccgtagctctttccgaaaatgctcatggccagctccgtacgtcccgctcccataagcccgcagattcccaccacttcccctttgttcacatgaatggacacatggtccaccaccttcctgtctgagtacaggggatggtataccacccagtccctgacctccagggcagtattgccgatgttgatattctccctcctggggaaccggtctgtcagctcacgtcccaccattccctttatgatccggtcctctgagatgtcgtctgtctgtttatccagggtctctatggtggagccgtcacggatgaccgttatcttgtcagccacatatgcgatctcgttgagcttatgggaaataataatggatgtcatgccctcctgcttgaatttaagcagcagctccagcagggccttggaatcatcctcattgagggaagccgttggttcgtccagaatcagcagccgggcctttttggcaagggccttggctatctccaccagctgctgctttcccactccgatatccttgatcaatgtatgggaggactcgttaaggcccactgtttttaaatagcggtcagcctcgtcgtatgtctgatcccagttaattgccattttctttcctttttcatttccaaggtacatgttctcgccaatggacatatacggaatcaatgccagctcctggtggatgatgacgattcccttttcctcactgtcactgattttatcaaacttgcacacctgaccgtcgtaaatgatgtcgccctcatatgtgccgtagggatatatgccgctgagcacgttcatgagagtggatttaccggctccgttttcccccaccagcgcatggatttctcccttttccaccttcaggtttacattgtcaagggcttttactccggggaaggtcttggtgatatttctcatttccaaaagtatctctgccattctatccctcctacaaccatacaggcgggtgtttctccccgcctgtacgattctcatcttttccggcctgattggccggtccatctgattactttaactggtcttccgtgtaatagccggaatcaatcagcatttctttgtaattatcaattgtgacaacaaccggctcgcagagatatgtggggattacgcctgtgccgttatcataagacttggtatcattaacttctgcctctccgccctgcataacggcgtctaccatcttaactacctgtgaggccagggtacgtgtatccttgaatacggacatagcctgcttgcctgcaatcaggttctttacattggcaatatcacagtcctgaccggtgataatgggatattcgccggtataggaggatgcaagggcattctcaacacccagtgcagtagagtcgttggagcaaagcactgcgtttaaaacggttccgtcggagtaatttcctgcaatgatggtatccattctgttctgtgccttctctgaatcccagttagcggttgccacctgctcgaatgtggtctggccggactttacaaccagctttccgctgtcaatgtatggctgaagcacgtccatggctccgccgaagaagaagttgcagttattgtcagccgggtcgccggtgaacatctcgatgttaaacggtccgtcgttctcctctaatccaagggcctctaccagatattcgccctgcttctgtcctaccatgtagttgtcaaaggttgcgtaatatgtaacagcgtcagagttcatcagaagcctgtcataggaaataacaggtatgcctgcttccttggcctgtcccagaggctcgcccagagagcttccgtcgatggatgcgatgaccagcagctcacagccgttggaaatcatgttctctacctgggatacctgggtctgtacatcgttgctggcgtactgaaggtctacctcatatccggccgcctccagctctgccttcatattgcttccgtcctggttccatctctgcaggtccttggtgggcattgccacgccaaccaagtgcttttcgccggatgcagcctcatcctttgctgcttctgtctcagccttggtgtcctctgctttggcgtcctctgcctttgcttcggtctgggcctctgtctttgcctctgaagcaggagcagctccctccttacttccgcatgccataaggctgcctgccatggctaatgtaagcatggtcactaacaatttctttttcatattgtaaatcctcctccataatgttttgatagtttaaatataccacagcccgctctggacttgcttggcacccatctgcacacttttaagaggtttaaaaaaatgccctgcaggatacaggacatttttgctcagtttattttatttttagttaaaaatgtgctatcatggtctttgcagaacttcctggtcatgaaaagcgaacgaatacacattagataaaaaccatatctccccaacactccatttataaacttctattttatttctgaacatgcttttaatgcttcgtaggcagcatacttaatcaactcaatttctaaactaatttcgctatcgcttaccgttggaactgcaatatattcgtcaacatccccttttgcatgtgctatagaacacctcattgaatatatccgttcgccaagtcttcccactattttttcatcactttttgttatatcaattgagttcttctgtgaattacagtatttatttaccctgtttttatcttgtaatatccaggatttaaactttgatatatctaaactccttgtcagcactaatttcaatgactctctctcatttaatatatttttgtatttgtgcaatacctttctaagttcattgtgatttacagcaggcattgacaacgcgccatattcgtttaaaaaataataattttgtgctctgacaaaaaagtattctaatacttgatagtaacttaaatatgccaatctcgcctctctggtattcagggcattgattaagtataaggctggtatatactcgaattctagtgaatgaaactgaattccatatgttttggcttccccttctaatttatagattgcatccatctcaacaacagaaaagtctaagtcatgttccattgagactttcagcaatatctcgttaatcatacggcatatttcatcattgcttaagaattctatatcaaataattgtattgataaatatctttcatgattcgtatgcgtatgggtaatttcaccccatttacctatattgataaaatagtcgtaaaaaacgctccacatcagatcgctcttagctccaatctcaccaatacaccttttcccatcatacaattttacggagccaatttcctgatagtcaactcccttgattattttcttatacgtcttcatgttgctaggtatgaccatacactcataatagtttgctatccgaatagcattattacctacgcggaaaaaagcattataaaatagtggagaaagtacattttgaagtgcacgccaatcatcccctggtttcatagactcaaccagcttagaaaataaagcaatttgtatatctaaaattttctttgatttttccgtcaattcaagcaattcccctccaatatccacagtattaatattatccagcgaaatagtcttaacccatctttttagcgcttcatgtttgaccaatctattcccatacattgacatataagagactcccttttgtcataatagtattccttcactttttctcaccttgccataaatcatttccagcaaagacagtacaacccatccttattttatggctgtatcttactgacagaaaagtcagttcacattcaaatacacatcctcctttgcatgaaacccgcccttaatgataacctcgtccatattttcctttgtgacggcaatgggctgaagctccaggtaaggtacgttataggtgccgtcataggcagtgtcctgcacctcctcgatttcctcccccagtcccaggagaaccgcgcatttggctgccaggctggcctcctgttccacggatttaaaagccgtcatttcctgggtttcctccacaatgcgctgacaggctgccaggtcgccgtcctgaccggtcacgcacacctttccggccagccgttcttcggacaaggccctaaaggcctggctggccagatcatcgtttccgcagatgattccctttacattgcggtccagctttaatccttccttcgtataggtataggcgttttccgcaatccagccagggcagttggcttcatagaccacattgagattgctgccggccagggtctcgtcaatcccctcccggatcagcgaaacattgttgtcggtcaggggcccctgaatcaggaagatatcgcctccgtccggaatattttccagcatgctctcagccatcagcctgcccacctcggtgttgtcaaacgatatgtataaatcgcacccggcattcattatgagccggtcataggaaaccgtcttgattcccgcttccctggctttaatcatcacatctgacagcgcctcacagtctcctgccaccaccacgatgacatccacctgcttcttaatgaaatactcaatctgggaaatctgttcctccacatccccgttggcattctgtacattgacctccgcccccagctcctttgcagcggacacaaacacatccctctcccgcatccaccgctctatgacaaaggattcaaagctgagaccaatctgtacctcctgctcctcctgctccacgctgcctgccgccgcgtcctctgtcttggcgcagcctgagaccgccaggaccgagaacagggctgtgaacaatatgcagacaatactgcctgcggtcctctttttacgtatccccatatggtttccctatcctttccttaaccagtcctaaacctgtccttaaaccttccctgccccattctccatccgttccctgtactcgctgggattgacgccctcgtatttcttaaaaatacggctgaagtaattggggtcgctgtatcccaccatggcgcatatctgcttgatgctgtaatccggattccggaggcagacacaggcctgtctcatcctggtccgtgtcaggtattcgatgaaattttcccctgttccctgcttgaacagcttgctgaaatagtaagggcttatattcaccatcctggatatctcgtccagggatatatccttctggtaattttcgtcaatgtattttctcaccgtatccaccaggtactccatctccttctttttctcagtacccgcgcattgacatatttcccgtgttttttccaggaaccagcggcacaatttgtcgctgtcagatgcctcttttatctcccggatataactgcccctgggctttaagccaaactcagtgccgtcctttgcgcatatccggtactccagctgcataatgagctccagcaccttggcctccaagtcttcacggcagtcataccttccctgcatacacgaaaacagctcggccccgcaggcagcggccccttcgctgtccgccttcagtccccgctcgtaataactgttttccagctcctttgggtattccccggccacgtcctcctgcctgcttgggatatccgtgatgtggaccacatggctgacgctctcccgcagtgccctcagcgcctccccgtatgactcctttgcgtttcccagagtttttgtgctaccgataccgctgcggaaatcactgccaatgtgttcctccagcttctggagcatggtcctggtccttgtgatgacctccaccctctcttcatacttaagcaccggctcaggggaaggcacaaacagcaccacccggtttcccatgacaggtccggcgatacaggaaaaataatccctcacgatttccctcatagcctggtaatacttgttggcctttacgctggatccgattacattggtcagcctgccgctctcatccctgtctccgaattccagaaccaggcagaaaccgtaatgctccctgattcccagcagttcctcgtagccggagctgtccgcgccgtcgtcctgcagcatattgtagataaatccgctctcaatcatgggaaccacgatttccagcctctcccttattttaaggtcgtcgcttctcttctgtctggcttcctccacccgctgcatggctttcatgcatacgtccaggattatctttttattggaaatgggcttggtcagatattccataacacccaggttcacagcctcctttgcataggcgaatttatcgtaggctgtgatgataataatcatcatctccttatccaccttgcgtatttcctggatggcctggattccgctgagccccggcatatggatgtccacaaatgcaatatccgggtgaaagctctccgccatctccacaacacctctgccggtcttgacacaccgtatatcgcattcgcttccaaagctggtggtaatgatcttcttaagggactccagcataattccctcatcatctgccagtaatatccgaaacatgtccaatctcctccttcaccggaatatggatgatgacctcggtccccattccgggaccttcgcttacaatctggaccagccccttttgctgataatacagctccagacggctgaccacattgtccaggccgattcccgtggaatcgccgtcatccggtgtttcctgctttctgccttccataacctcaagaattctctctcggctcatacccttaccgttatcccgtacgctgatgcggatggagtccctgcatccatgaaccgtaagaagaatcgtcccattctcttccatgccgcggatcccgtgtctgaccgcattctccacaatgggctgcagtatcatgctgggcatcttcacatccaatacccgctggtctatggattctttaaactgtatgtcccctgcaaatctcacattcagtatgtagatataattttcagccgcagccgtctcatcccctaccgtggcatcctccaatcctttctttacattatagcggaaaaattccgccatcttatccaggaaaatgcaggttttttccgcgtcctccatcatggccagctgggcccccgcattgagggaattaaacagaaaatggggattgatctgggactgcaggtatttaaggcgggcttccttcaggtggttttccatcaggagctcccgctccaaaagctcctgctccttctcagccccctcctttaccttagccacatattcctccaggcttcctaccatctggttgaaggtcctggtgacaatgccaatctcgtcgttggaatccgtatccggcatctttacattaaagttcccctgtcccaccagattggcggtcctggccagactggtaaggggcgttaccatatcctttaccagcatcctgagcaccataagccctgccagcatgacaatcatcaggattaccatgttgaacacctccatgtagcgaagggcctccctcatggtctggtagctggcagagttgtttttaaactgcagctcattgagctccgatatacgcgtgttgatgtactgatagagggtaagggccctctcatatgcctccctgtaccgctctacgtttcgcccccgcttggcctgcaccgcatcctgggtcatatccagataggattccgacatcatgcggatgttcttttccaggatttttcccggcttgtcaatggtcttatcgttcaggcgttctaacaatccctggtattcctgctggcttttgtaatagctctcaaggctgtccgagctctttacggacacatagtctcccatgtccttctgcacatgctccagggcctctgacagctcgcttaggtttacattgctggcatataccgtatccatcttgccggcaatcttgtttacctggagatagataaatatattgcttataaataatgtcagtatcataagggtcacggccagcagtattttcttctccaggctcagatggctccatatgttctttcccggtctctccatactcatcgctcacttttcaaacaggctctaatccacattttcctttgtgacaaactgcaaatccacactgtaataggaatttgcgtgtccctcctgcagatattcctccaatgcctgcacacagtaccgccccatctgctccgtatcaatgacaagcgttaccggaatattccccttcctgacagcctctaaaatctgatctgacttgtaataccccaggagctgcagctcccccaccttattgtaatcaatcatggcctggtaggcagcctctgtatccacggcctctgtacacacaaggacatccggtactccctccttacggaagaatatgttccttatggtctcatccgcatccaccttcccggtggatcgcatggtctcctgtatgagcctgacccgtcccgatgtgtccggtgaagtcaccagcaggttattgatctgttctgctatctgcacctggctgctgttatccctgtcgtggagcagaagcatcacctccacatcatccttatccggcggcaccagctttaaaatctgttccccgtactgccggcccagctggtagtcattgacccccacaaaacttatacggctggtatccggcgcatccttgagaaccgtgaccacgggtattcccgccttaccggcctcattaatccgctcatctatcttatggccgcccgtgtattccaggataattccatctaccccggaagcaatggccatgtccatgagactctctatctctatggtggaggaaagactctttcccattagttccaccagggcattgtgctcccttgcagcctccctggtgctctcgtacacatccttccagaaaggcatgtcacaatcctccacaatcatgacataatggtagcggtattcgtttccatcctccccgccgtccttccccacctgatttaaaacattctggtaataggagctggtgaccagtgtgaggaacagcactaccagtattccagcaattacaattatacgttccaagcgtacccgggttttcattgtttttctctgcctgccctctcaatcagcctctctatcccatcctcagggtaggacagaagcttccccaactccacggcaatcctgtatctctcctgccctgtataggagtggtctgcaatcaatcgtttctgttgttccttcagtcccatatagcgctccagcacatcgccggtccggtaaaagaggtaattatacttacccttattcaactcctcggggaataaatccgtaataaaagcctcgtcctccggataaagcttcaccccgtacttcctgcacagcttttctgcatcctgcaggtaggaatcccgttcctccctggtatcgcaggggtggctcatggccagtgtcttaaggccggcagacaccatctcgcagaagcagtccatggctcccagcccgtaggaataggtgtcaattacatgtacagcctcctccctgttcacaaactcatactcctccttgtccagagacaggggtattcccgacttactggtcacattcacgccgccataccaggtgctgtccaccaaaaagatatctccaacctggtattccatggaatattcatcattctttttaataatccgtatcctctgtccgtccatagctattttcccccagccacacattataataaaatatcggtattcctctattttatagccacccccagttcctgtcaatccaacttacaaactgccccaagtttaacagcgactggtttaacagcggcttattttttcacactatcaaatctccccccggcgtgatataatttaattatcacgttcagactgcggtcttagccttagaaagacccggtacacggcaatggaatgatatacggggggatgattatggtattaagatgtttttcggctccggatgaaaaggtaaatctctgcttttatccctgcagctgcggcaccggaccgggagaccacgatacatactgccaggaatcactgtgcatttatgatacagactatacaaagctcctgctgtcctatctggaatccgaattcccggaatttgatgtctgttgggataaccgcatccctgccgggacctggaatatcataatacagaaaatcgaaaatgacatgagccatattcatttcgatgatactgtctttgacttttacagccggttcatcagctggattgcagacgcactggagcaggaggacatgattatagtggaggggaaccagtaagtcccccacctcccaatagaaagcaatgttttctgtcaggccatctgctatgtctgcatcgtacttctgcatgacacactgcgctgataatgcatattttatgcctcccagccataattgctgataaaacagctgacaggagctggtatcaccagctcctgtcagcttgcttagcgcaatcatagcctcaaatttacatctagcatgaatttacgggcctcccgctcttcctgttccataagccccttccatgcctctgaaaaatcctcccatcttttttcacgcagcaatttaattatctcctctgtaaatcccatgtaccgtaactggagtttctggtttctaatccggtataacataatgggatatccccaggtcagtaaaccatactgttttcgataacattcacgtatcattaccatagggcactggtgctcaatccatttaaagtacagttcaaaacaaagatgcaccttgttttcctgccttaacaaatcaaactttccggtcaaacgctcctgtgcctccccgctgcaggattttattgtatacaatgttatatccctgattgtcaaagcaagcagctggaggctttccaggtacaggctcattccctccagaatctccggcatcctgaaattcattttggccgtcctcattaccaccaaagtaccctttccatggaatgactgggtgactcccagctgggctaaaagcatcagggtacgccttacggtggctacggatacatcataccgctgtgcaatctggggtaacgagggcagatagctgcctatgggatacgcccccttcaccacctcccatatgatgcgcccggccagggaatatttaagctggggcctcctgcggtaaatattccattggaacggaatcctgctgttgtcaattaaatacattccgccctctttcctgataaaaagggacatatcttccaccatttttttataagaaccaaaaaaaatccgtctcaaccgggcaactatctcttctttggacgcttccggtttcagtgtttcctgaatctccagcaatttatctgtcagatacgggaaacgtaaatatcggatttcttcccagaacagattcagaatcagcttgtttttcagtgtgcccagtgtcaggctgtaaagctccaccagtatggatatgacccccagcgaagggcaggcaagcgcatttctgattttatcccagtcctgattcgtccctcttctcaatccctccagccacaacggccccataagcagcggaaccgaatgaatcatatcttttattccttcttccctgagggcaaaatattttgcggcatgttctcttatcttatccggttcagcttcatagacaacaattgccgtccgttttccgtccatccttatatacccttttcgcccaagcagttccaaagcggattgaaccgctgtaggacccatatggaaaaaccgctctgtctccgcaatagccggaaggtgttcaccagttctgtacatcccgaacaggattctggtctcaaaatattcataaatcacacggtagagtccgtcgtctgtatacatatattcacaaaaggccaacattttcatgggtggtccaatcctatgcggctcacttcctccatctgtagttgttccacgatatcgtaatatctcagtcgcagctccggatgattatattgtacaatgccttcttatctcccagtttgaagattagacgataagtaccttccccggtgttctcaggaactgtaatggttacagcagcatttccctccctctttgcgccgtctccctgtcccagatccaaatcgccgcttacttcccagccgtctgcttcaatatacgcaccgtcctccttccttctgacttcaacctgaattatttccgcctgcgtaatgtgttccatggagtatgataccgtaaatccaatggctgctccgggcgtggccacgcgttcttccccttgatcagctttcacactgaggccatatacaggattcgcttttatattgtaagttaattctgtaccggtaatcctacctttacctgcgttcacacctgctgcaaacagctgtgcgctgatgcggttattttccagtgtcagaccggccgtatcggttgtatccatgataactgtatgagcctgcccccggtccagaatcaaatataccctgccgttaacagggtagcagcgtttttctccgtagataaacgcagtccccttgggaaacgcctcaccctccggtgttgtgagcaccactgccgctttgtctgataaacgtgtatcctgctggggagatacaaaaatgctgatacggtgctcccctctggccagtccctcctggctgtccagtgttattgcagccgttgaattattgactgtaaaatacccgcctacggagtcagctcccgtgtcattgcgcaatctcaaactgtattcccccggcataagactggctgttttgtcaaatgccgctatgactgtaattgttttggcggcaatattttcattaaatcgactactcccccacatctctgcaaaattgtccagaggaatttttccgtccttctctccccctgtcagggtatagagatagtatcggtttccgctcagcagtgtgagcttagcaccgtccggcagcgcgtgtctgattccactgctgtcccgcagctccagccacacacttgaagcggcgagggttccattctgacttccaagggtgaacatcgcagtaacagcactctcttgagatattaccaccggagctgtatcattcataccctcatattgttttccggatgccatctgaacagccgaaacaatagattctttccagtgaatattcagtgtgacgggaaccttattcccatctgcgtcagacagtgtcaaaataatttcgtctgtgtccttaggcgcaaaagcaccatgattgtacagtacaaaatctataggggcctcataccggctgtccgttgttccgagtaaaaccgtaccggcagattctttatacgtgcttatatcatatggttcgctcataagattcgcggtattccacccctggctctggacaggcttcagagtgaccgccacatcataatgttccaattcactgtttacagctttcagtgtgattccattttcaggtaccttaacccctgccagactcaggtttctgctggaatctgccgggatcaccatcctgcccgtatagcttccgctctccgacgcataaaggtcaatcgtctgctccgacagcgcactggccctggtgacaacctccacattcatggttatctcctccgccaggatatcgcccgcgtaccgttccaccaccacgctcaccgttcccaggttctgacttatacgaattccatcattataataggtcagtttaaattcaatgttcggaatgcctgacgtttcctggtccaggacatgatattcccaatcctttccgatgattgaattactgttatctgttccggccgtctggtctgagataacatttgaaaccacttctgttttaccggtattctgccacatcaccaaaccaaaagtggaagccggtgtgttccgtatcctcgctttttcctgctccgcgctcacatccggacctgatgtgatccacgttcctgtttccaggttcattgccgcgtccaccagtgtcattttgtctgacagcgtaattgatttgattgcatatctgatattctctgtatcaccaacaggcggaagctcgatggttccctctgccgcggcaaagccatcctctcccatccccaggctgtctgaattgcgggctgtcagcacaacgtggcgtgtagcaccggcattatctcctgctaccttccagtagcggtacgacgtgcctatatttgtgtatcccagctccgtcttttctccgggaaccacaaaacctccgtctgatggattaagagtctctgtcttcgccctggcaaacgcatatgcatccgccgtatcacctgcaatcatataaaaatatcctgtaacggctccatactcttccgagtccccctgggatgtgttggaaatacggaatacagtaccggtggaaagtaccactgtatttgggcaatgcgcaagatctgcctgggttaccaccttgctttccgtgtcatccacgcttttcagatttgccacactgttggacgccgaatccaataccagggtacttccgccttctaaaacaagactgtttcccagttctcccaatttatcaaaattccctttatccccaatccgattcagggaatagggagtcgtctgattcgagtttgcaacatcagactggccggccagccggacatgagtctgaatcaggcgtacctgatctgctctttgtatggatgtaactgtacctgtaacctgttccggctgtccgccgccagaggcagccgcgccaaaatgatccagcgttaccagacgcacatcaccagcgtcgcaggatgcaccgcttccaaacacaccgcccgcaatctccatctttttgccgccagtatcccccgcgccaaaactgtaatctgttccgtcaatataaacatgagaaaaaccgtttactgttatggtatcataattcaggtcagcgctgtcaccgccgtaatcaccgcccgcataaacggaaccgcccacagacaggccggaggcgtctaaaactggtttttcctctgcatgggatttataatagttgcatttatcaatggctcccagtccaatatggacatgggtggaaccattaacaattccctggaaacctccaccaaaaaccttaccgctgacagtaccgcctgtcagatttacaaatacaaggccggacgcggatttctcatcctgttctccgcttttaccgtcattactcagctcgcttcctccatagacattcccgcgaacccagccgcccgtcatattgaccgtagaacccccgtaaacaaaccggtcgcctacttttcccagcgcaccaccatatatggagccgtttacggttccgttggccatatgtacagccgccctcccatgggtcagccccgcttctccgccgccatagacgtttcctttgatggttcctccgctgatgattacatttgttgagccctctacctcagctaccttcccccctccatagacataaccttctattagtccgccttttatttcaaccgtaacctttgagttcttacataccctggcagatttttcaaacccggccttattgactccctcgcctccgccgtagatattacctttgattgtacctccatttaccgtaatattggcctctccatccaggtatgcatttcccttgccataatccttttgcgtgtacccttggccgcttgcatatatgttacctgttataacagcgtcattgtctattgtgatgtctgcctttccggttaaactgccgaaatcagctgccggggttccatttacatcgttgccgccatcaactcccgcctccccgcctacgcccgcggcgtatatattgcctacggttcccgctgacacggatatatttacctttgttgcatcttcgccgcttactacgtatgcagcagagccggagccatagatgcttgaaatacttcctcccgtcacaatgatgtccagaattccctgatacgtcgggatgcctgttgcccttcctgagcctgccccgtagaccatattaacagtcccgccggaaatattaattgaagttttccccgtgtacggcgccttcacattgctgaatccctggcatccgccgattattttgtttactgttcctcctcggatatagatgcctacattcccgttcttaatctccccgctggcgcttccggctacaatggtgtcaacttttgcagttccgtccacaatgataactgcctcgttgttatttgcgtcaacagatccattgctccgtatatatcctataatcctggcaatactgccgctgcggacctgaatgatacccggctttactgtcagagtaccatcttttgatgctccgtacaaatacaatccactgcatgaaacattatcccctatggttatattgtggccattcccatatagatggttcatcttttcaatggtcagtgaatcaaacgtgatatcctcatacaaatgaaaatcactttctgttcccgctgcagtactgaaaaattctatgtctgccgtaattcctttgattgtcaccggaaccgcatgttctttcagaaaatcagttgtattgccatagtcataatcttgcattaagataatctgattaccgtctgacgttccgccatcctccctggtttttaattttttcacagcagcttccacggttttaaccggggcattttccaaaccagaattgccgtcatccccgctggtctgattcacataaaccgtttcaagcacagccaccccgtttgcaggctccgagtacaatgtaacagagctggccgctgtcatgcttctggtcatcttcacaggagtcaccgcgcagcggaaccgcattcccatatcccctgctttcacggaacgtttatatacaggtgagtcctcacctgcaatatcttcccatagaccatcgtctccatttccatgattatcagtccggtttacatcttcgccgtatgcgttcttatcatccgggatatccgcaccctgtgctgaatactgccattgatacaaaaaggcatagccgtccatgctgtttaccgtttccccggttttcttatcaaacagggtgtagatcgctgtcccgccctgccgttctgccctgacgcccatctgatatgttccaacgggcttccagacagaatacaggttgagatgctcctccccagtatccgtatatgttcccggaaccagtgctttagccggttctgtccctggttctaatgtccatcctgcaaatttagcagtaaaaatggcattgtcatcccatgggcattttatttcttcaggacattccggcagacacacctgcccttcacaggccggaagttccatctccatcatatcatccagaattaccgtaatacaactgtccgccatcacataacctgcatattccgccgcctcaataaacgtaccattctcaggagaacatatgaccataccggtctgcccttcatagaaaacagtttccggattctctatcttctgctgtgaaatatattcaatatcatagtccggattttcagcttcaaggttttccgttaccttttgaggtctgctgtccttaccgcccgttccgttttcacgttcagacggcagctcctggttatggctgccctgtccggctgcatcacccggcttatctccagatgttccagatgtatccccggcctcagtattgtccccactgtccatactgtcatccttggataatccgccttcctgtccgctgcccgtgtcagggctgcccccgccatcagcgtccgcattatcaccgccggtatccgtactaccgctgtctacatctgtattgccgcttccggtatctgtactaccgatattggcatccccactgccggtatccccgcttccgttgttagtgtccccaccgccgccggtatccccgcttccgctgtcggcgtccccaccgccgccggtatccccgcttccgctgtcggcgtccccactgtcaccggaatccgcgcctccgctgccggcatctccactatcgtcaccggagtctgcgcttccggcatccatgccggactcactgccagaggaatccgaatccccttccggtattccttctcccacgaaagggacctgatgattttcaattcttgctatcagggaaagtgtatccccatgtgccgtctcctcctgttctgtccgctccgtctcctcctgctccgtctcttccggttctgtccgctccgcttcctcctgctccgtctccccctgttctattctatccggtttccccggttctgtctccccctgttctgtctgttccgcagtttcctgcttggtttcttctctatttccttcattaacagcgttctcatctccggttttatccgcttctccgttttgctccccttcttctatccgttcctcagaggttactttctcagcttgagacggggtcgccaaagtgattgtctcactttcttcgggctctgcttttttccattctgtgatttctcctccttcaaattcgtttcgaatcacagtgaaccgtgcggcctgagccggactttctccagaaaacgcataatccccgattcccacaatactttcaggcagtataagctccccctgtaatccgcccagcccataaaagagacagctcccaatataggtaatcccatcctcaatgaccaatgtccggatttcatctgcatattctgcaaatggagccgtatcgcaactgaaatctcttgtatcgccatatcctttaaccgtcagtacgccgtctttcagaacggctttcacatcactgccaatttcaaaggttctccggtttccttctgttgcatatgtaagcatggacccaaagttcagattgctcaatacaagagaaaaaataaggcaaaacaccagtatgcgctgccggttgtgtctctgcctcctcaattgaaatttctggcgttttccatccattgcattccctccactacataaaaaattgactgttattctggttgagccgcagtattatccgccggattggcttaaatcaattgcatcggcaaatgagtccttacccgataatcctatatcagcctctgatttcagcagtaccaatgaataaatcccgtatccgggcgaatgaaatgtgcatttattgtctttataaccagtgacccggatatccgcttcatccggtatcacacctgaaggcaatgtgacggttatatccttttccccgtccgcacataccatggtcagcacagccgcgttgcggccgctctcatcctccactacatactgattacccagctgccttttaaatacacccgtaagggttttcttataaggaaacacagattccgccaccacccttatttcctctaattccactgttcctccgccgccttcaggtttgtccgcgggaatcactgaaatcggcacagtgcttttttcaccggcttttattgttccctgaatcccggtatcgcccccctcaaccgtgcctcccgtcacactcaccctgtatgttatatccgcagaggttacccgctctgaatccgcaaagttatagagttcaattgtgaaggactgcgccattggatcaataaaatacgccgcagttcccccatcctctttcagcaaatcactggtaaagtaaaatgtctgtgcttccacaactccgctctggctttcctgtttcatataacgcgcagccgctatgcctgccagagacagcataatccccgcagcagtaatcagcataagagccgccctctgccgtttcctgcggattttgttcatcattagacgcctcctattcttgtatagccggcacagtctgttccgagctgaccgtcagtgtcaccaaatcaatctcatccgtatattcagtccccgccttgtcctccggccatgaaacagccagagtatatgtatgaatggcggaaactgaatggggcagacggccgccccggacagccgccatcccgccattgaaggtcaatgttccattctctcccgtattcacgaataatccctgatgatcaggattactgttgtcataggtaagagcaaagtccaatggcagattccccgttgtctcaactattatggaataatcctgtcccacttcacttgtgactccattttccgtattggtaacctcaaaaatataggtttttttatccccaggccgcagtccgcttacattgatatcaatggtactgctgccgctgccccaggccgccaccgtggcagccgccatgccattctcctgagccgtaaaccgtgcataggagaacgaccatacagatatgcttgcggccgcaagcagcaggccgtatcctgcaattccggttttcgtcaaatgctttcccattcttatatgttccctccagattgtttgaccatcccaatcatatccgcccccagaaaaactgtattttcccgcgcgccttataaaaccgtccttttcccgtgcatgtatctacggaccttcctgctgagcccatattttaagcctgaccctataatcaaggtctgccttgcctgcatttgtgtcaatcccgtcctttccgctctcataaggccactgccactccaaaagataggatttgctttcacctgcacccaggcgtacggtatcactttccgcagcgccgccgttttgtgtatcccaccaatcggtaagcggctttctgtctttatatgtaacaatacggaaacgcatgggaatgtgtaagctgtcttcctcaattgatagggtaaagataacatgaaaggaattattattttcaagtataaacgggtagcttccttccgcgcccggcaaaagggtctgcacatttcccgacaaatcggaaaacaattctatttcctgaccttgtgtccagctcacacgaaaattcggaatcggtccttcatctttgtcatctccgccgcctccgttatcaccgccggtctctccaccgctgtttccgctattgtctccgctgctgtctccgctattacctccgccgctaatgcctcccccgtccttgtcattgccttcgctgctatctccgctgactccgccgcttcccgcattgctttctccgccttccccggatccaggtccggcattaacaccgccgctgccattcccaatttgagaggaatcattacgttccgccggtttcgtcccagtgtcatagccgtttcctgatacactttcattcggtccggcgggattaccatgtgtatttgaatctggaccacttgtacctgtcccgataggcgacacctgattatcaccggatataacaacaccacctgctcccggctgtccgcgcagcccatctggtgtaaggattacggttccattctcgttcctctcaatcatcgtttctcccggaagtaaaatattcccattttccagcagtttggtcccatcaggcaaagctgcatcctgttccgggtaaatcacctggttttccggggtcaaaagagcgatccccaaaggtccctcacttgccggcgcaaccacagttttgtctgctgtaatcaccagaccgcctggtgtgacaagtgttccctcccaataatacgcttcccctgttggtgtcacaagacggccgtctgatgtcaggtaggtcaatttctccggattaatatacaatgagttattcttttcatccagctcgattgccacctccatcagcctgacatcgactgccacctcaatggtatactgcccgttttgctgcaggctgacattgactcctgattccgcctgagccgaaaaaaggttgactttccgttctcccaaaacattacccgtacggtccaaaatacgaatctggtgctccccgccctccacatgaaaaaacgtaaagctcccgtttgtgtccgtaacggtttcccttggttcactgtgaagctgaaccctcccctgagcatagggcctgccattggtataattaatttttcctgccagatgaaatatctgctgcatctgctgctctgctgcgtctccatcaggtgtcagaagtattgtgtcgattctcctgcctgatgattcgggaaatgcagatctgccgagaatatatcccgccgcacaggaggacaaaagcataagtaaaaataacaacagtaacggaatccatttatgattccctgtcttcttttcaggagcaaatctatttccatgtttttttatcatatttgccttctcctctgctgataaccgccgttgatattcggtctatgagaaaaaacgcggcgacttgccacgttctttctcttaggctgaatactctgaaacatcctgcctccggcacagggaggcggagttagttacgctgttggagctgttgtttccgttggttttgtctgcgtaccggtggctttaatcttcagcttccaagactttcctgcatacttattgtcgtttttatctgcttctgcggtatctgcgctgccataatcccatttccagctgacggtaatggtccttttcatagcatcgtctcctgctgcatgctcaatttttccttctatttcattgcccagactataatctgtaccatcaacctggaacaccaaatcatccggtaaatccggcatatccggctcagatgacttgtcaattgtaacaatataatcaatacccacatcactgcccgttccgtccagcacaatgtcaaatgatccctgtgttcccggagcaatgacattatcaccaatcgtttcccccttataggcagttcttcccatatcaattgaacttagcgcagctccattatttccggttgccttaaactcccaggcagccactgttgcctctgcttcgccttctacctcagtaacaaactttgccagtgtcccccctgtcagacaggttgtcatcagagtcaataccaaggctaatgcaccaagacgtgctacataagatttttctctcatatgtattgtcctctctttcatttcaaactgggaaccatatataacagcccagacatggttcccaagtgtctgaatcgctgcacccaggtattcctcctggttctataacggcttttctcacactgtgcctgtgaaatcagccggtgcatcctaatttcacttactgtccggatctcccttttctctggacctgtattctctcaattctgcctccagagcagccctgtgttctgcctcctccctgtcaaggcgccttcttctccagatatcccacagaataaacaggcacaacgggcatatcataaacagaatcattccggctgcagactgcatgaacataatcccactacccatcccgggaattttacctccgcgccagattccctgtacctggtccgcgcttacggcctgccggtctgctgtattgttcccgtcgccctgcgtgacataccgtacctgcccatcctctccctcccgaattcctacaatcctgtgtgtaatggcctggccggagtccagataacagatcacgtcacctgtttgaagccgggccggatccgtactatgtaaaaatatcatatcccctgtctgtatcaccggctccatggagccggacaggacaataacaggttttataccaaatactcccggcatctcaccgggctttgtgtaggtgctgataatcaatgtcaggtttataaaaatcaccggtataaagataacgcacaatatcccgcccataacggaccggactgagatcttcctgtctctgctcatttgccttcctcctttgaagaaatgtcatgctgcagcttctgcctgagccggaacatctcccggcaggactctatataagccatgtcatgttcctgtgaatcccctcttttctcttccggagcagccccatttgtaaacacattcacaataaactggttcctatcatgttccattttcctatgcgcctccccccaatgctcagccccgtccactccatggtcccggatctaaggagggcggcatatcaggattaagtaaaacatacaataataaagcctgcgctgcatacacaggccggcttcacaaatcatgcagctggctgacacctctttttagagagaaatccctgtagctttgcgtcactagctttcaccagttttgctaattattttttatatcattggttttcttaaaagctgcgtctgctgaggatatcacataatatacattatgtaatagacttccgatgaaaagaataaaaaagctttcatcgggaacctttgctatatccaaatttaactctgctcatgtgttttgggaaaaataatgaaaagtcagaggccagaaactggaaaactattgaaaaaagctgactttagatgcataataaaaacgggatgaggatatccatgttaatgaccatgacataatgtatattatgttctggtcatttttatatcagcaggcacatccttgacaatacacgggcatgctcctcttcactggtaaatgtataaattctggtatactcaatattggagtggcccaggatatcggccagatgcacgatatccttctgcatccggtaataagtaaccgcgaacagatggcgcagattatgcggaaaaactttttccgggctgaccccggcctctttgcacaatgccttcatttctgcccatacattacaacggttaaccggtgtaccatttttggtgacaaaaacaggtccggagtagattccattctgtctgcagtattggagcaggcattttttcagcttctttggcagaaagactacgcgctccttgcctttgttgtaaatagtgattcttcctctctccagcgcctccctagtgataaaacggtgctcgctgacacggataccggtactgcatattgcctggatcataagaaacaggcggctgcttgattttgcctttgcagccaggatcagcctgttatattcctctttagtcagctctttatcctttttccgaaatggatttctctgtatcttaaatagttttacctgacagtccttttttccgataaaatccagaaaacggtttacagataccagcatgctgttggcgcttgttgttttgtatttcccgatgattgcctgcttatatccaaccaccacttcttttgaaatctcttcacggtcagacagccatgataggaaggacaggacatcccttccatatttttcaatggttgcagcggaacgttcttcctccaatagataatttcgaaacagacatagttttttctgaaattcgccatatatattcatacgtttctttctcctgtcattttttgagccattctgtattatcctaacataaaggtatgtccatggggaaggtaggggtatcttacaatttctggtattttaggatctattttttgtaatgctttcatatgttagttttataggtcctggggcattttgcgcccttttaggacataaaaaaaccagttcaccctaatgatgaactggttgataccattggccggtatctgccgtgcctttttcactgcagcctatagctgaaaacatgctggggattccgccgctgctgcgttgagcctatgttctatgcgaattgcacctatcatttaatttgcatacttaccctttctcacatcccaaccagctccagcgggcacgtatactcttccctaattttcatatgccccgtctcacaccctgttttcctcaacagccggcagtatataatccctgaccagcagccacctgttcttcgcctccggcacaaaaccggacgcaatcgccgccaccaggttcctgtcaggaacccagcaaatcatgtttcctccatctcccatggcggcgtggacagccactccctttttctcaaaccgccaccacatataaccatagcggctgaaggttctcttcacagactgacggacccatgattctgaaatgatacgcgctccattccacctgcccatgttcagatacagaaggccgaaccgcgccatatccctgggagtcatggtcagcccccatccgcctgcggtgacgccgtcaggatcgtgcacccaccccctgactccttctccaaacagactgtcacatgtataggtttccatgggataatccggaatcaccgtcattccaacaggctcaaacagatagcggtttgcaaattctctggtactcatcccaaccgcccgctgtaaaaccgcggacaaaagatgggctcctgccgtacaatattggaaatgcctgcggggtttatcggtttccctctcatccctcatcatatccagggtgaatcccacccagtcgggagatgtacacagctgttccaagggttccttccattcctcaaaagcatagggcaccgtcatagtcagcagattttcaatggtcacattcccgcagttcctgttatgtgtttccgaaacatactccggtaaatactccattatcctccggctgacagacggtatatatcccttgtccaccgcaatgcccgtcaacgcggacagcacgctcttagtcaccgatgccacatggaccggaacatccggtccaaagccatgaaagtactcctcacagacaatacagccatttctgaccaccacgatgccattggtatttgcgtattctgatgtgataaccgaacgcagtttttcaggtaatgcccgttccatgccctgctccccgggatctgttgtccgccactccgggacaggccaattttcattttgcatcatataagctccttcacgtttataggtacaccggtgtatgaaaaaagcatataatgattaaaaatgaaaagcaagaacatttttaaaaatgataacaggatactatataaggcactgcacgtcacaggacatgataatggggaatgatgtcctcataactcccatccttcataaggaatcctcctggtatcacgcccaactgtgtaaatccaagcttttcatacagatggagcgccgaagcattactcttcaccacagcgttaaactgaagtatcctgaatcccagctttttcccctgctccatgcaatgcttcaccaatgcctctccgatatggtgtccccgcagccgggatttaaccgcgtagctggcattgcagatatggccgcagcgccccacattattgggatggagaatatacagtcccacgatttctcctcccccaccgtcatacgcaatccctgtaaatgactgctctgaaaaaaaacggttccctgtctctgccgtaagaagctccagctgcggaaatgccgctccctcctccacaatatggttccatatcctgactgcctcttctgcgtccgcctctgtatacttccgtatcctgatatccatatctgtaaaatcccctttcctctatgtaaaatcattttccattcttcttaagcccttactccgttactataaacaattgtaggcggaaaatcaaggcactcagctctgttttgcggcattgacggtattctgaatgacgttaagaatgtcctgttaacattttccaataccttccagttgttcaaaaggactgcggcaacaatccattgcagcagtcctcttaacttttgttttttattttctgttttctgttcttcagcctttatctctcatcttctgtcttttatctcttatccctcagcataacatcatgtgccccgccttccacaatactggtggaagataccagggtgatttttgccttctcctggagctccggaatggtaagcgccccgcagttgcacatggtggagcgcaccttgctcagagtgaggttcacattgtccttaaggctgccggcgtatggaacaaaggagtccacgccctcctcaaaggacagcttcttatccccgcccatatcatagcgctgccagttcctggctctggcgctgccttcgccccagtattccttcatgtagcttccattgacattcaccctcttggtagggctctcgtcaaatctggcaaagtaccgtcccagcatgatgaaatcagcgcccatggccagcgccagcgtgatatggtaatcgtgtacaataccgccgtccgaacagatgggcacgtatacgccagtctctttataatactcatccctggcctttgccacctcaatcagggccgtggcctgtcctcttccgattcccttctgttcacgggtaatacagatggcgccgccgccaattcccaccttgacaaaatcagctcctgcctctgccaggaaccggaatccgtctccgtccacaacattgccggctcctaccttcaccgaatccccaaaattcttccggatgtagtcaatggtaatcttctgccactcagagaagccttcggagctgtcaatgcacagcacatccgctcccgcgtccaacagggccggcacacgctgttcatagtcccttgtattgatacctgctcccaccatataccgcttggagctgtcaatgagttcgttctcattctttttatgggtgtcatagtccttacggaaaaccaggtacaccagctcctggttcttattcaccagcggaaggcagttaatcttgtgctcccagataatatcattggcttctttcagggtagtggactcgtcggcataaaccaaattatccagcgttgtcataaagtcctttaccttagtgtcaggtcccatcctgctgacacggtaatccttattggtgacaatgcctaacagctttccgttgggctgtccgtccgcagtcaccgcaatggtggaatggcctgtctcctccgtgatggccagcacatctgccagcgtcatatccggcgatacattggaatcactcaccacaaaaccggccctgtaccgcttcaccttgtgaatcatctcagcctgcttctcaatggcctgggacccgtatataaaggaaatcccgccttcctgcgcaagggcaacagccatcctgtcatccgatacggactgcatgatggcagaaaccatggggatattgatggatatgtccggttctgttcctttcttatattttaccagaggcgtcttcagattcacctgggaagggatacactgggtggatgaatagcctggaatcagaagatactcgctgaacgtgcgggaaggttcctcaaaatagaatgccatgttatttctccttttcaattttatatttattctccgccgaaccttgtaactggtactatcatatcatgcccccatatcttccgtcaatcaatgagcggacgttctccgtcatgtattatcatatacgcagcagttccagtcagagcgtctctttgcctgaagtccggcccggccgtcagtccatatatacccgcgacccggtggcacccttctgcccctggtattttccattgtatggtttcagggctgtgtcatccatttccgcaaacacaagctggccaacccttcgtcctgccttcagctcaatggcacatcggtttgcattaaacagttcaagggtaatctccccctgaaagcccgggtccacccagcccgcattctgtatgaacagacccagacgccccagggaacttctcccctccacaaaagcagtcaggttgtcaggcagggaaacatactccatggttgtggcaagcacaaactggcccggaagaaggatgtatgtatctgtatttatggtcttgtacctgacctcatcctttaaagtaatgactcccgtggataaatcctccacaatactgaaggtattccccagacgtatatccacactggccggctgtacctgctctttatctaacggcgtgattgacaaggtacctgcctccagcattttaaatagtgtcctgtctgataaaatcatagtgtctccctcccatattaagcgttactatattttatcccataacccctgcgccggcaatataaatttaccaatcattattctccggcttccatgaaaataaacagagccggttttccccaacaggaaaaaccggcccaatctgccgtcactctatttacagggcattattccgccctgcgttattctgtcttgcatttttctgccctgcattatgtcatccagcatatccttacactcatcatatgaatccacaatcaaatcagcttcacttacatcctgttggattcccgagccgcggtacgccgccacccgggctcctgccagcctggcagcgtgtatgcccacagcggaatcctcaaacacaatgcacttacaaggctccgctcccagataatccattgcctttttatagcactccggatccggtttgtggttggcgcacatatcgccgcatatgacaacatcaaacagcgcggtcatcctcatccggttcagtgcaatcataatcagccgggtggaggtagaggtcaccagtcctgtcttcattccccggccccgtatctcctgaatcagggataccacccccggcatggggcggatacagctgttttcgtatgtatttcccacctgccggcgctttcctgccaggtcctctgccgtgaccttgaccaaagacctggaaagcaggctctcgattctggctttgtcattggtaccgattaaagccttccgttcatcatccgtcagttggattccaaaggccgacagggccttttccagatatgctgcattgctctcctctgtatttgcaataacaccgtcaaagtcaaacagcacaaactccgttcccataggcgctccgtctacagtgcgaacagcctgcgggcattggtctgtatgtacgcaatctcatccccggaaaggtcgcagaaatcgctgttttccatggagcagttggaatcctggacatacatcatcttggtatccttctgggtgatggaatagaaccagcactctgccggcacattatacaccttcccctgctccatcaaagtcagttcaatcttaaacccgtcatccgccttcgctgcggtaatcagaatcgcctttcccgctgccagaataaactgttcatccgtagaatgatggatttccaggtgggcaataccgtcaatgtcattgtccggcttccagttcttgatactgacaagccacttttcatttttataaacacacaggataccttcaccattattttcatacacatccggtctcattatcatttcctcctaattatgagcacttagcgcagtggctggttatgagcacttagcgcctgttcttcagactcttacgtgcggtacatgtcactggcacctggctcctatatttcagtcctcccaagaacaggcacgccgtagccaaatgccccttctttggcgcacattttagccgcaaatgcagctcccctctccattgcttccaccagtctttccttcatgcgttcctctgtgccctccaccacagcacctgtctgcgaggtttctaacaaagagcacaggaaggctgcaaagtaagaatcacctgcacccatggtatcgatcacatcgtccgcatggacagcgggcgcatacaaaaagctgtcatcatacagtacataggagccctcctccccaatggtgccaaggaccaccttaactccataagactgtaccttcttcatctccgtttcccgctcctgcctggtcaaatgggcgcaggaaagaatggccaccgtgacatacgggcacaccttctccagatacgcgtctgtccatctggtgaaaaaatcataggcaatggcaactccggtttctttaagactctttaaatcatcttcgatgtaagaattcaaattagtataaatcagattaaattggctgatatacgcaaaatcctcctctgtaaaatcatagccatactccctggcgactcctcccttattggagcccagaaatacccggtcatttcctttcagtgtcaccagggcaaatccgttctcaccctcatggcagcggctatggctgtcgtcaatccctatctgcttcagtgtatcccggacacattcagccacctggtcactgccgtattttccaaggtaagcggtataagccccgttgagtttggcgtacacacatgtattgacacactggccccccgggtacatcctgcctctggaaaggtatttatcacagacattatctcccactgcaattattttgtaatccttcatttcatttcccgctttcttttatttatatggattgaactgccggatgatttccgtggcccgcttctttcccctgtccatacattgggatatggattcccccaggcttacgccataggtaaatgctgcgatataggaatccccggctcccaccgtgttcaccacaggcaccttctctgcttccttttcatagaaccggtccccgtcataggcaaggctgccgtgttctcctaacatggcaatcacagtaccggtgcccttttttctcacttttaccatgaagtccctgatatagctgtcgtcccggtcataagagaaaaatgcgtagtcaagatagggcaatatcaggtcattgccctcctgctccagccgtttggaaaaatcatacacccaaatctgcccgggctgctttaactccttaatatagcggtcaatcctggaccagcgctcagcgtatacaatatcaaaggatttcacaaattccaggtcctctcctgaaagttcaatctcctccatggcattcccttcaaagtgaagatgcttcttatccccatccacaatatccatggtggccattccggtggggcggtccgcgcgtttcagaacgcgaagggctattcccctctccttcaggcgttcttccagagccatggcaaatacgtcattgccaagaatggtcatctccgtcacatcaccgcccaaatcccggtaattaaacgcaaaatcaatgctgtttccggtgaggtaataccggtccagcttatagtacacatcaatgcagttatctgccattgcaattgcccgcttcatgttctattccttcctttcccccacagcgtatatcatataatggcgcattttgattccgtcgtattcgcagaaataaatgtccgctgcatggcccagcttcagctctccccgcacaatgggaaatacacagtgatttcctgtcagcagggacttcagatgacccggtgtgtttcctccgatggtcccatatgtgggcaggtaatggttatgatggtacggatagtcctccggggcaatgcggcttaagcattccataatgtctttttccacacagtccaggctttcattgaccgtgatgcctgtggtggtatgctccgtgatcacatagaccagcccgttctcaatcccgctttcttccacaaacgctctgacctcaggggtaatcttaatcatctcaaattcccggtccgcgcagacagctgcttcctttagtttgaactccatctatctattcctccaatccccaaagggtatgcccggcatttttatgcatgtcccaaaaacctgagggcatttttataatatatgttctcaagggtttcggaagagaaccccagactgtccagtccccgcttgcaccggacaggccggattctgggcgaaccggagccaaacatgattttacgggaaatattatgctccacccacagctcccccatatcttccttaaataccttatggtatatctggtaagggccgtcaaaattcatcagcgccgtgcttgtataacaattttcatatttcagaagaagggcggctgtctcctggacccagggccatcccacatgggtcaggcagatattgatatccggatatctgcagcatatctcctcaaaatcagctggtctggaaaaccttgaaaatgcctgctgttccaggctaagtcctgagtgaaagataatcggcctgccaaattccctgcatatgtcatacagaggcgtcaatctctcatcatagggatacatgtgaagcctggccgtattgacatacaaccccttcagtcccagctctccaaatgcacgtctgagttcatccgccccatccttacttcccggatccgccgccgcaaacccgataaaaaaatcagaatcacaggctgccagctgcgctatctcatcattggatatggctggttcccctgttttagatgaattgtcatccggcagcatgaaaatcttctgtatatcggacagggcatactgcttcttcagcaaatccatgtccgaaggtcccatcagatgataattcatctcatcgcaccgttttctgaatctgtccctgtcctggcagattggtccaaaaagcgcggggcgtatatgcgtatctattaccatgtctgttgcctccctgtctatcgcatttccagcacaaagaaactgctccggctattccttatccatatgcatcctgtgcatcagttccctgttattcaaatacaaatccctgtatatgggatagtttctctgataaaattcatggttttccctgtccggtccaataattcttccctctggaagtttctccttaagctggtgaaaatcctttaaacatcccgctcccagggcagccagcatggcatccccataggaggaacattggaatgtttccggtatatgaaggggcattccggtcatatcgcagataatctgcatccagacatcatttttcgtacctccgccggctgttatcagggtatgcggcggaagccccatttccctaaacagcatcagatgctgtaacgtggaatatcccacagcttccagcgccgcccggttgatatgtttcctcgtatgacttcccttcagcccaaatatcatgcctgtggccagcgggtcctgtatgggactgcgctccccgtatatgtaaggcagaatcatcaggccctctgagccgggctgaatttcaccggcttcccctgccatgactgcatatgcatttttcccgcccttacgttccatttccagctcttccccataaaaggtatcccgtacccaccgggtcagtgtaccggctgcgttggtgccgtcccccaggcagaacgtgcctggtatggtaaataccttgccgcctttaacagaaccgtttcctccggaggatatatagtcctgcaccatacgatccacgcagtagtaataaaacatggatgaaccatactggaaaaatgcggttcccggttctgtcagccccacgctgattgcctccgatgtggaatccccggtaccgcagataaccggtgttccctctgccagtcctgtctgagccgcagcctccctggtgacacggcctgccacatccgtggaatatgcacaggccgcaatctggtccggcctgcagtaaagtccgcattcctcctcattgaccgttccgtccgcccggtaaagaggccggaaggaacccttggccaaaaactggtctatcacatacctgcctgtcagctttgccgtgataaaagaacttcctgtgagaaatttataggtccttctgtatacctccggctcattgttcttaatccacagtatcttcgtggccgtgtcgccggaacagatgggatgcccaaacagccttcggacatccctgccgtaatgcctggtgagccactgtatttccttgtcagccctggaatcaatgccgtacaggatggccgggcgcagcggcctgcactgctcatccacaggcaggcagtccgtccccagggtgctggctccgatacagcttatctgttccggggcaataccgccggcttcaatcaggtgtctggatatcccgcagaaatccccccaccacaccttatctgcatcatgttcaaaccacccctgccttggatgactcattccatgggccatggtatgttccgctgtcaccctgaaatcttcccctatgagcattcctctggattcataggttccaatgtcaattcccataaaatattgtttcaatcatcacatctccttatgattccccgcggatctctttgacaatttccataaaatcacggacccgtttttcatccacccgttggttaaaaataccatcctttttaaaggctgatccaatgcatacagcatcacaatgtttcagcttttcccttacattctggtgattgcacccggtgttgcagaacaccggaacattcttctgcttcgctgcctcatggaccctggacagaaccacatcgtcaggctctgctcccgctgctgcccctgatacgcagaggccgtctgcaaaatccccgaacataatggacctggccaccacctggatatcccgctgcacaaggtaggcatccgcctccggattcaccttaaacaggagcttaaggtgctccattcccagagcctttctgtgccggacggcctctccgctgttagagacatagaccccatactctcccatatatgcacctgaaaaacagctccgcccaaagcgggcgcctgttgccgccgccaggtcaatggtcgcaatgggattctttacaacgttgaccccaaaaggaaccctgattctgtccttcagcttcccgattatgtatgccatggcagatataacggcaatatccgccacgggctggtacggcaggctgaactcgttggcaataagaatcccatccacgcctccatcctgcaatgccgtgaggtcgtgggccgcatggtccagcaccacatccatgtccccgcaaaaccccgggtcccccggaagggcatccagatgaagcagtgcgataatgggcttatctgctccaaacatgtcatgaatccacatatcatatctcctctattacatcccctaattcatgggtatttttcttcatccaggaaacgatgtcgtcgatagccttatccgggtcacagtaatatctgcggtcacagatttcaaatgaaacggttccatcgtatcctcttctcttgatggcatcgtaatactccttcatagggaaatccccgtggccgggaaccgtatgccccctgtcattgaagtgtatatgcataagccgttctcccagatggtcgaaataatcatccactgtctccccggcatacgtcatctggtccatatccaccattccaacgatgcagggagagccgatttcatccagcatcccggctatgtctttgcttgtaatcaggacattggtggtggtgaccttcagctcctccaggaaaagccggacctgtttcctctgacagtacacggccagctgtgccagcgactcccggcagtatttccacgcctcttccctgggctggtcaaaataaccgaagcctgtactgatttggatgttagggcatcccaggaactccgccgtgtcaatggctctctggtaatagcggatgctggactgccttgtcacaggatcctgggtacagaaatttacaggataaacacaattttcaggcgtcatagccattaccttcaggtttctctgcctgatatcccggtccagctcaatcagccggctcagggaataatcaaaaatgttaagctgaggcgccgagcagtaaaggtcgatactgtcaaagggagagctctccactttgtccaggaacttttttatgggataacgtaaataatggtaattcattggagcaaatttcatatattgaggcctccttctatatcacaagctgcactttcacaaaactggcagcaccggagcctgtcataaaacccgtcacggctccggctgctgccggactgcattaaaagattacgcttccaagaagcagggctgccgccacagataccactgtacacacaagtcccggtaccatgtaactgtgattcaggacaaattttccaatttttgtagttccggccgagtcaaacgcaatggcagcaacacactgtcccgaagcgggaataaagtaattggatgagcaggcaatccagccggccactatgatgttagccggaaggcccagcgcaataccgattggcaccataatcatggttgtggaggactggcttgtggtaatggctcccacaatgaatacagcaataatataaatccatggatactggttggtcagggccgacatattgtcagtgatgaaggaggactggtctccgataaaggtatttaccagccagcacaggccaaatgccagtaccactgcgaacatacctgtacggaataccggctggtccagaaccttgtcgctgtcgagctttgtgataagcaccatggctgcggctgccaccagcataaagatttcaataacagttgtcagcggtaatttgtttccgtcagcaagtgtaggtacaagaggcttcacagcgcccagcaaaacaatgcctgccatggcaatgaggaagattgccacagaaatcttggcttcctttgtggcaggtctttccttcttctctgcctttgtataatcctctatctgtcctgctgcaacacgggctttaaattccgggtcatctgccagttctttgcccttcttgataactgcaagcgcgcagaccacggtaccaaccagagtagcagggatgcagacaagcagcagggtaaagatattgacggagccatagcctgtggcctcagccataaaagcaaggactgccacggtagccgctgaaatcgggcacgctgtaatggcctgctgggatgaaacaatcgaggctgagatgggccgttcaggcctgacgcctgtctcaatggcaatctcattgataacaggaagaaggctgtatacaatgtggcctgttccgcacatgaaggtgaaaatataagccacaaccggagccagtacggtaatcatcctggggtttctgcgtagtatcttctcagcgattttaacaagatagtccagtccgccgcatgcctgcatggtggctgccgcacagattactgcaatcataatcagaataacggtaatcggcggatcggaaggtgttacatgcagtataaatgtcataatgaacattcctattccgcctgccatcgccaggaacgtaccaccaattcgtacccccagaaaaatgatagccagaacgataatcaattctatccaaaacataaattatcctcctaatcctttgtaaaatgtttcccctttatggtctaagaaatgattcaatcttttgttttaagaatggtgcgcacattcttggtaatacaaaagcaattcagttttgtatttctttgtattgttctgtattgttttgtatctaatacaatagtatattcatttaatagatttgtcaattgctatttattattttgtatataatacacagtttttagcattatttttgtgcatattatacatcttggcctgtatcaaatatatcgccattacaaatatgtttaaatacatttaaatacatttgtcccctaaccatttgtctgccgccgttttttcgcgtcttccatcatcagtccattatcctatgcgctctgaataccatgcaagcgcccttctcatggcatcttccggattcatgacatatctcctgtccagtatttccagccccagataccccttgtagtcaaaggcttccagggtatgaagcgcctggtccagattcaggtttccatctcccggaaccaggtgcccgccgggatttccgtccacgaaatgtacatgggccaggttctcccttcccagaattccgatgaatgtttcaaatgtatccactcccgtggtggcaatcacatccgtatccccaaggcctttgagggccggacttcccaccgtgcgcagcaggcgaaggagctggcttgcctcattgcagatatgagtggtgtattttgtgaatggttccagagccagggtaacgccctcgctttccgctttccggcagatttgcgaaaatgaatccgcagcccatttaaaggcatcttccccatccacatccagataggcaaacccggtggataccaccatgcagctgcaatccaggcacaccgccgcctctatgtgcctttgaaagaaatccacggtcctgtcacggtatctcttatccggatgggagacactgatgggataaacacattgctcaggcgtaaaacaggcaatcttcaggtgatggtccttaatggtcctgtttaattcacgcagacgtcccccatcaaaatcctccagatgcagatgaggcccggaagcccacagttcaacagactggaatcccagacggtttgcggaatccaggaagtaatccagcgtatatcgtttgtaatggtaatttgctgcgcagagctgagaaattttcatacattttcctccttgtagagcaaaataccccgcagtacgctgcggggtttgggccccgcgggcagagatccgggccgtatacggcttaaagcgtattaaaaaatactccggcacgctgccttcgcgggaatgaatatcttatcgttttttcgctgtagcttaatactccactttccacatgtagcggcgtgtcacaagcggatgctcacgcttttctgcaagggcgtggttgtagattggatatacgttattaaacagggagtggttaaaataatccaccacagaagcatcaatggtagaaaggcccagctcctttgcgtccaggacttcaatcctttttgcataggtacgaaggaactttaaggcccgttcatccagcggacgggtggagccctccgaaatctgaagcataaacggacggtttgcatctgttatctcaaacggaccgtggaaatactctccggtatggatgctgctggaatccagccactgcatttccatgaaaatacagatgctctccatataggcagcgccgtaagcagccccgcttcccatggtatagattacaggatcgtttttatacgtttcggcaaactccagggctctctctgcaacatgggcacgtgcattcttaatgatattgctaatcatgcccaggccctcctggaacttgtcatagttttcatagccttctgtctgcgcagtcagttcaaccgccaccaaaagagcacatatggttttctcccccgcatagtcaatatcgcctttaagatggtccgggctggcgtcaaacgcataacggatgatgtagtcgccaaattctataatttccgattcctcaagccaggtcagaacaatgacagcagctcccttttcttttcccagctttgctgcctcaatggtttccggtgtattgcccttgtgacatgccaggcagatgatagaattttccccaaagtccctgggggtgctgtgaacgaattcattgctgttaatccaggcggattttatggaagcacactccttctccataaatgtcttagccggataaagagctcccagtgaccctccgcatcccacaaaatacaggttctttaccccgccctttgatttcttcgcttccaaaatttcagcaataatatttttgatatccgcgccaaagtatgccattgtctcaaatctcctttgcatattgtttttaattgtttctatgtttatgataatacaatataatacttattgtcaataacaaatttaatttttcgcaattatatacaatcaggccaatttgtattataatataactgagtattataacttaagggtaacgcggaggatatatatggaactaaataatacaattgctacccctctatacaagcaactggaggaaaagctgcagaaagagatagaaaccggcgagcggcctgccggaagccggcttcccacagagaacgaattaagcgaaacatataatgtaagccgtgtcacggtcaggaaagctctggccggactatctgaattaggttatctttaccgcaaatccgggaagggaacatttgtcgcagaaaaaaagattcagcggggtatcaccaatggggttttaagcttcaccgacatgtgccgtatgatgaatgcatcccccggtgccaagatcacgaaaatagccctggaggatcccactgaaaaagagatggagctgatgtccttagacaaggacgaaaagatactggtgttagagcgaatacggtatgctgacggaaaaccggtccagttagagctgaataaatttcctgagtctttttcctttttattcagcgaaaatttaaacgacagttccctgtatgagattctgaaaaaacataatataattttagaccattcccaaaaaaccctggacatcgtattcgccacctcaaaagaagccaaagccctgggaatttcaagcgggtacccccttttgaggatagaaagcgttatacacgatgtggataacacaattacgaacctctgccgccagctctgcattggggacaagttcaaatttattatttaagaaggttttcacgcaaaaggcgcccataaccgctggcagtcagctgtaatgggcgccttttcataagtttgttttattggtttttctgcttgttttattgggttttctgtttaaaaaggttttctgttttgaaaaggttttctgttcttagcagatcttctgtcggcatttgtgactgtcagttcttccggatattcttattcacaaaatcatctgcaaaccggtaatacatcttttttggcatatactccgccatggccttcacaagttttccggccttatcaggtacacagacaatactgcctttttcaaactccttcatggcctcatccactacctccccaggctgacggaatccaaacataccctttctcgtcttatccacatacattccgttattttcgtgaaaatccgtatccacaaagcccggacacacggcctgaacccggattcccgtgcccataagctccatatgaagcccttcagtcaatgtgacgatgaagcgttttgcagcggcataggtgacattgccgggcaccactgcaaatgccccgtccgacgaaatattgatgataatgcctttatttcgctctttcattcctctcaggacataatgggtgatttctgccacagcaattgtctgaagataaataagacgcttcaatccatctatatccgtatcactaaatggggttctgaaaccaaagcacgcattatttaccagtacatgaatctcccttccctctaacgatgcaagcagctttcttaccccgtcctcctgagcaagatctaccagtaccacaattaccttacacgcaaacttatccctgatttcctgagctctcctttcaatcacttcttttctcctgccggtcatgattaaatcatatccttttcctgcgaaccacttggcataagccagccccagaccgctggttgcccctgttatcagtgcataatgtttcaatcttccgcctccttgattaaatgaacattgttcattcattatttaaaaaaagaaattcccgaaacaccggcaacgggaatccttctcttatctgccgtcctatttaccattccaagcgcgcttacgcttctaaaatacaattcataatcatgcggatgcccaacgctttctcagccgttgacaatccgtcgttctccaggacaggaactgcgccaaagagcatgtatgacgctgtcagcggtatattcccaacccttgtgattccattttcattcatctcccgcagcttttcctccatatacggttcaatggtctcacacagcttaaccgacataagcatctgaagatcgtgattctcctttttatgaaaaaaatgatggtacttttcctttccatctgtttgaataaacagctgttccattttgtccaggaaaccatccagcgaatcatccttctctttcagacgttcaatcatgggatgcgtaatatcctttacatactgctcaattgcagtatcatacagcatctgcttggactcaaaataccggtaacacagtcccggcaccacatgcatggctgccgcaatatctctcatggtagctgcctcataccccttttccataaaaacagacatggccgtgtccaatatttcctgtctgcggacctccggttccttggatattctggctgtcttgcgttccatctgtcaatctcccctttttctgaacagaatccttctgcttaatactctgttttcattagtcagcagggttccatacctgtttcccaacaagctgaccgtctgctatatacatagaatatcactccattgaacaa

SEQ ID NO: 3397 - DNA, 133569 bp, Unknown
  gut microbiota DNA sequence
atcgaaaactgagaaattattactttttttgttctatttttattccatctttaagattctatttccatttcatgaatatcgctatattccattttttatatgatatactctgtttatgaaacatacatatcctgattgcatggatatgataccataatttcaaggaggttgcgatggattatctgggtctgattcctttatttgttttaggtctggccatgattataaagccggaatatctctgggaggttgaacatattttcgcagtggacggcgtagggccaaccggtctttatttgacatttattcgggtcagcgggacattttttatgatttgttccgtggctgccgcactctatgtattgcttccgtagaggtgagattgatatatgatacgagcttggaaaggccgcggatttaaaagtctgcagcctttttcagtcctgtccccttccaactttcttcctttaatctttcaccataatacttcaaattcactccgcccctcatatgctgatacagaaaaactatatccttaactaacatacatgtttcacacaaagttcaaaattccctccccaggcttcatgttataatagacttattccaatgaaccacaggagggattccatgcgcatattagtgattgaagatgagaaacggctggcatttactctggctgacatgataggcggggcaggatattatacagatgtctcccatgacggggcagagggactggagcttgcacaaaccggcatttacgatgccattgtcctggatgtgatgcttcccggaatggatggatataaggttctgaaaaacttaagaagcacccgcaacatgacgccggtgctcatgctgactgccaggtcggagctttcggaccgggtgaggggattagatgccggagccgactactatctgacaaagccatttgccaccgaagaattcctggcctgtctgcgcaccgtgctaaggcgccacggagatattgcgcccgacactctgacctttggcgaccttatcctcacaccctccatgcctgaacttatctgcggagaaaacagtgtgtctttaagcgccaaggaactggaactaatgagcctgctgatacaaaacagcagtcagtatctccccaaagaaaccatactccttaaggtctggggatatgacgccaatgtgaattccaacagtgtggaggcctacatatcatttctgcgcaagaaactctcgctgctgggatcctgtgtttctatctccgtcatgagaaacattggatataagctgggggtgtccctatgatacgaaaactcagatggaaattttcagccatcatgatgaccattgtcgcttttctgctggccgtcattttcataacgctgtactacacaacaaaagcaaactacgttcagcggagcatgggcaccctgcattccgccatgctggaaaattatccgggcagtatgcgggaacaggcagggcagccgccctctgcgggccagcgtcctccctcccgcccccgcaggcaggaacttcctctgatggtggttgatataaggcagggcaactatactgtagtaaagaaccagcttccagatatagaaagccaggaggccgaaaccctgatatccctggcggaaagcaagggcggtgagtccggtaccttaaaagacctgcacctgcgttttctccggggaaaaaccaagcctgaccaaacagtgcggtatgtattcgccgatatatatgaggaacagaattcactctattggcaggtgattcactcttccatgatcggagcaagttcgtttgctgtctttttcctgttctccatccttctctccggatgggctgtgaaaccagtggagattgcctggcagcggcagcgccagtttgttgcggatgcctctcacgaattaaaaacacctctcaccgtcatcctctccaatgccgatatgcttgaaaaagaccgcgatataccgaagggacaaaaccggcagcggataagccatataaaggctgagtccctgcggatgaaacagctgatagaaagccttctcgccctggcccggagtgactcaggacaggagtctgcggtctgcgcaccagttgacctgagctttattgtaaacagcagtcttatggcctttgagcctctggcttttgacatgggtaaacacatcacctatgatatcgaagctgcacttcatgtaaatggagatgataaaaaactccggcagctgacagacattctccttgacaatgcctgcaaatacagtcaggataacggctccatctgtgttaccctgaaaaagaccagcgcaaaagaggcgctcctcactgtctcagatgagggggcgcctctcacgaaagaagaaatcaaacacctgtttctccgcttttaccgcggagacactgcccgcagcaatatccccggctacggcctcggactttccattgcccaaagcattgtatctgagcatggaggaaagattgaggccagcacggatggtttcgcaacaaactcatttatagttcggctgcccatacaggaataagaaagtattcccggccacccggcatgcttcaaggcttcggcttactccatgctaccgctgcttcccagaacatggataccttccggcaagctctcttccggcgaattccccgccagcaaagtctcctgtattacaacaacggaggctttgccggaaacatttccggctccttccgattctgattcactgccaatattatctgcgtttcccgcttccggctgcatttttcgccttccctcccggcttccttcagcattctctccttctctaccttcctgtgttcttccgaagttttcctccccggttcctgctcccggcctttcttttaactttccttctccaccgcctgggattcttctaaaacctccgctggaaggcgtgccatactgattcaggatgccatccaccgccatctgaatatcctgttctccggcctctatgtaataagtctcccctgtttttaattctggcgagctgaaaagcagagcctcaaagggctttgaaatctctgtttccgtcaattgatttcccagcccgtcctttattgatatggttgttccggcatcctgcatttcatcaaagtaaaccatcagcatgggctgggatgaattctcagaaaacgtctggaacattcccgcacttcccacagccaatatggttcctcctgaaatggttcccgtaccattgtaatccaaagcaccatttcccccttctgccgggccttctgcgaggacggtacctccctccagatacaggtctccattggagtctataccatccccggaagcattgatcttcacgtttcctcccgtaatacggatataagccccttctgttgcaccaaaagaaccgccggctgcatttggaccgccggatgtatctgtaccccgggctgcattaattccatcatcctctgagttaatctgaatggttcctccagtgatttccaaacagagcccttccagtccctcgcggctttgttccacgattatggttccgcctgagacttccaccagattatcactgtgaactgcatcgtcgcctgcggacagcgtcagctcacctgagaacaaccttacattcttgccgctgtgtataccgtcatcctgagcatttatgtcaatgatgccgcctgtaacctcaaccagcgtttcggccagtattcctttctttcctgctgtgatggccgtggttcctccggtgattctcacatatcccttgtcttcttccccattattatttgactgtatcccgtcgctgcctgctgtaatggtaatctctccgccgttcacctctacggcgtcctttcctttcacgccatcttccgccgcctcaatgacataggtaccggaattaatggtaaggcgatcctttccccgtataccattcatataattaccgctgactgtcagcatgccgttcccctcaaataccacatcatccttgctgaaaatggctgcatccggctcgtcctcccctgtctgcggataagtatatgtatttccgtcagataccctgttttctgtcctatcctccaggacaatggtcagaagtccgctttggctggcatagattgcggaataatccgcacttgtaatggaaacgccgtccagtatcagacatacttcatcctcctttcccgcgtccaccaccacgcctccccctgtaatgtttcctgtcaggcggtatgttccggaagatgaaatagtgacattggccccgtcagccgcagcccctgtcccttcaatggccactgttgttccatttccagtgattcgtgtttcctctccatcaccaaaggaactgtctgcatctgtccggtttgtgtcctgcgtccctgccgcttcctggatgcctgctgtttccgatgttccagcggctcccgccttactcccatcctgcccggctgtctttgtgcatccggcaagaaacagaacaccggccagtccggccgctattccaaatatcttaagtttcctgtatttcagtccatttctgcccatatgattatcctcctataattcatccctgccatccggcagccggccacagacaatggtaaggttcccatttctgcaccgtatttcatccagcatgttcttttcaataaattccgactttaaatccacctggtagcacagttcatagagactgcccatattcacggtcctgacccgcacaagctctgactttttagtatacttcgcaaatatatcgtcaaaaatccctgaatagtccagattttccggtatcgtaattttcaattcctttctcccggccctgcctgccggaagggatatcaaaaggatggtaattccgccagacacaatcatcagaagcatagcggttcccagaaaccccattccagcggccagacccagagccatggccaggaatatacttccaatctctcttgcattgccgggcaaggacctgaaccgcaccagactgaacgctcccatgaccgccactccggtacccaggtttccgtttaccagcatgatcacggtctggaccataacaggcagcaggaccagagtaagaataaagcttctggaatactggttcctgtatgtatgaaccacagccagcactgcccccagcattactgatgtaatggtacagagtaaaaattgtcccattgtaataccggtatttacagtttctgtcaacacactctcaagcacagattctacctccctctataaatatcccttgatacaggtactctttataataggcaccatattttgaataagacaccggaaaaagccccatatcggaaaaaagcctgctcatccataacggcatcgccccaggaattttcacctccatcagaatttggtccttatccaaaagcattgttccataaactccattcttcagatccagtccgctgcacctgcagcaaatattccggtcaaaggtaattcttaattcttcattgccctttccgtaatatgccgcccggtcataggccacaaaagccgcgggttttaagtcataccgattcaaaacataatctatttccttcaatatctggctctcctcaatccgccggattccataatacagatactttctcgcctggcagagaggcactggtatccggcgtttgtacaccaccccgtcaaactttttctttaattccgcatataccacgctggtgtccgtcgccttcccatatgccctcaaacgcagcttttctttatattccggtttttcaatggattgtctgaccagctggaaatccggtgtatcaaagtaaatattggatatggtatattccccgtaatggtctgtatccatctgtctttccagagcaggcatcaaagcatcatactgtttttgggtgagcatatattttttctcgtagcgtttgaatatttcctgagtcatacacatggcctccttcatcttttatggcttttatcctaacagcccaagctgaaacaaaccttaaaaaaatcctggaaaccatgagctttctgtgaacggtccggggattttctgtgaactgacagggggtttttccggatattgtccagaaatgttctccttttttaatcaatggaaaagaaatgttcaaaaaacacacattatttttttatgccaacccttttacagtgttttccaaaagcccgaaataatagtgcatataatttgccaattaatcaaaaatagaaaaataaataaacaaaaaattaacaattgacaaaaaacaaaacatttgctatattgaatgtgtaaagactaaaagttttaaaaatgcaataattcaaattaattttaattttaaaattacaatgtaacttcaaaacagtgagggggcttttacatattttaaatgttttctgccagtccctgcacagttcatataacataaagttataattttcagaaaataataaaaactttattttttaaaacattagggttacaatctaagtacatttatacttaggaggaaattatatgaagaccatcgagaatgaaatgccctttttccaaaccctgctaaagcttttaaaaaatcagtttggtatggagtcagagtttatcctgcatgactggtcaaaaggttatgaccatagtgtagtagctattgaaaacggacatatcacaaaccgcaagattggagactgcggcagtaatctgggcttggaagtgatacgcggaaccgctacaagcgatatgaaatgtaactatgtcactcgcacaagggaaggaaaagtcctattgtcctcgaccatgtatataaagaatgacgatggacaggctttgggtgcgctgtgtattaacacagatatatccgagagaatcaagataaaggaatatttggactcctcgcttcccgaagaactaaataaaaaggacagcaacgaagaattcttcgctacagatgtgtctgatttattagtatacctaatagaccagggaataaataacattggaagacctgtcagtgagatgaccaaggaagacaaaatgaaggtattacgttttctggatgatcgaggagcttttctcatcagtaaatccagtacaaaaatctgtcagattttggagatctccaagtttaccttgtataactatttggatgaagtacgtgaacgtaaagagtccatttagaaataaaatttctaccaaagagtagaagattaagaaaggacggcgaggtagtaatgaaaaaaatcaaacagatcaagagaattgcagcagttgtaatggcggtttcagtagcagtggggttaacggcctgtcagcagaaaactgactcccagggaaattcaacccagacaggaaccctccagaaagtgcttaaggagaggaagatgacagtaggatgcatcctgtcattccctcccttcggctacaaatcggaggatggtactcccatgggttatgacgtggatatgatacatgaactggcggattctttaggtgtggaagttgagattgttgaagttactgccgatgccaggatcccaagcctggagacaggtaaagttgacgctgtattcggaaacttcacaagaacactggagagggcacagaaaattgacttttcaaatccttatgttgttgccggcgaacggcttctcgttaaaaaaggaagcggaatcaataccgtagatgatttaactggtaaaaaggtagctgttacaaaagggtcaacaaatgcagaactgatggcaacactaaacccaaacgctgaggtggtattctttgaaacatctgcagatgcacttcaggctgtgaagaacggccagtgtgcaaccttcttggaggacagtaacttccagcagtaccaggctgctcagaacgatgaccttgaggtggtaggcgattccctcatttctctggaatacaatgcaattggagtaaagaagggtgatcaggactggctcaattatctgaaccttttcatcttcaacaccaatgtatcggggaaaaatgatgaaatgtactcaaaatggtttggagaaccaatgccatttgatttaaatcctcaatattaattaaagtaaatggggctccgttctggtagccccattctatagaaagaggtgttaatatgttcctggattggtggactcccatcgaaaatcttccggcgctgcttaaaggcgcacttgtatcccttgaacttacattgacagtcttcgcactctccctgttcttcggaacgattgtgggttttctgcggtataacaaacaccacaaagctggttaccgcatcgcaaccgtatatgtggaattaatccgcaacacccccatgctggttcaaattttctttctctatttcggtctcccccaatttaagatttatcttcctgccttgttcgctggtattctgggactgaccattaataacacagcttacatagcggaaatcgtccgttccggtatccagtctatccccaaaggccagtgggaagctgccaattgtctgggattaaagcccatccatacgtttttggatgtcatttttccccaagctctgcgcaacattttcccttcgcttattaatcaattcatcatgatactctttggtacaagcctgctttctgttcttgacatcaaagatcttacccaggtggcctccatactaaattcccaaaatttccgaactctggagttgttcacctttgctattggcatctactacattatgtcagtgatctgctctaaaattttaagatatgttaacaaccggttctttccaagtatcagcaacggcgggaggtaaaataaatggatggttttttacgagttttctcctattggaggctgctgctggatggttttttgattacacttaagctttctctcacagtaatcattaccagcacacttttaggtgttatatgcggtatgctctttactttaaaaaacaggggaatcagaggtgttttaaggatatatgtggaattattcaggggatgtcctcttctcatgcagctgtttatgggttattacggtctggcttatcttggtatacaaatagacattttttcagctgtggtattagtgtacactctgtacggaggtgcctatatagcagaaataatacgttccggaattgaaagtattccaaaggggcagtgggaagctgccaaatgtattggcttaaatcctgtggatgtactcagagacgtcgttctgccgcaatcctttaaaatatctctgccagcactgattggttttcatcttggactaatcaaggatacatctattgcatccatcattggatattctgaacttctacgagaagggaaaaccatcatgaatgtcacgggatatcctttcgagacttacattctggtggcagtgatttatttcattatatgttatccgctttcaaaatacgttgggtggacagaaaggaaggcaggcttatgattgaggtaaaaaatatttataaatcctttggcactctggatgttctgaaggatgtatctctgactgtgaacaagggcgaggtagtagttatcataggtcccagcggttcaggaaaaagcacactgctgcgatgcatcaaccatctggaaactcctgataagggtgaaatcgtggtggatggcgagattctcactggaaaatccggccaaatccggaaagtgagggccaatctgggaatggtcttccagcaatttaatctttttccccacatgaatgtctacgacaacatcaccctgggtccaaaacgtgtgcaaagcatgtctaaagaagacatggataaaactgtggatgacctcttggcaaaggtagggttatctgataaaaagtttagttatccccctcaactgtcgggaggtcagcagcaacggattgccatagccagggcactggccatgaatccggaatacatgctattcgacgagcccacttccgccctggatccggagctgattggcgaagtactggaagtcatgcgccagcttgcaaaagacggtatgacaatgattatcgtgactcatgaaatgaagtttgccaaggaggtggcggaccgcgtaattgtaatggccgacagccacatcatagagcagggcccccctgaagagttatttacagaccctaaggaagcccgcacccgctcattcctgcggtccgtcttggaaaaagaataaaataaaaatacagaaaggatatagcactatggatgtatatgaaaatattaggaaatcaggatacgaattacccccaagtccgcccaaaggaggcatttataaaccagttaagcaggtaggtaatctgttgtatatctcaggccagggagccacaaaggatggacagcctgttgtctccgggaaacttggaagcgaacggaccatagaagagggtcaggaagctgccagaatctgcacactgaatgcattaagtgtgctccatgaatatcttggtgatttaaataaaatcaaaagtgttgttaagattctggcatttgtagccagcgctccgggatttaattcccagcctgccgtggttgacggcgcctcccagctcttaaaggatatctttggtgatgacaacggagtgggtgcccgttctgctatctctgccatcgaattacctggtaatatctcagtagaaattgaatttatatttgaaatctgaagcaggctggcttatattgggaaggaagaataggaatggacgaaaatcgttatcttcttaaacacacggacgagattatcaccccttgcttaatctattataaggatatcattgagcagaatataaaagaaatgatatctgttgcaggcaatgcaaaccgtttatggccccatgtaaaatcccataagatgaaaaaattagtggaactgcagataaaaatgggaataacaaggttcaaatgcgctactatagctgaagctcaaatggttgccgaaagtggtgcttccgatgcactggtagcttatccattggtagggcccaacatagaccgattccttgaattagtcaaaacatatgctggtacacgtttctgggccattggcgatgacctggagcaggtatctctgcttaacagcgctgccggcagccaagaaaccatagtgaattttttggccgatgttaacatgggtaccaacagaactggaatttctatcaatacactgccagatttttaccggaactgctgtaaacttccctggctctctgtccaaggacttcactgctatgacggtaacaacgggattgctgaatacgatgccagagaaaaggctgtagacaaaatagaccgggcagttttctcaacagtggctgcactggagcagacaggtctcccatgcccggttctggtcatgggaggaaccccctcttttccctgccatgcccggtataaacgtgtgtatctgtcgcctggcacaggcattatctctgacttcggttatgccagtaaatttacagatgagaccttcatacctgcaggcttactcatgacccgcgttgtcagtcatggtggacctggactctttacattagatttgggctataaaggaatcgccgccgatcctcctggtctcaaaggctgtcttatgggagactggcatgccagccccataaatcagaatgaagaacattggatttggaaaatggatgagggttatgaagaccagcggcccggtattggctctgtattatatgtaattcccactcatatctgtcccaccagcgccctgtatccggaggccctggttgccctggatggacaaattgttgatatttgggaagtgacagcaagaaacagaaagctttccatatagagaggtaagtgctaatgaatatactggataacaggataattgctattctcagagatgtggatgcagaaaacattgtagacgtaataaacgctttggtgggtggaggtatcatatccattgagattccgttaaaccacagtactcccgccgccaaggccgccagtctccgtacaatccaaaaatcccatgagacttttggagatcagattttcctgggtgccggaaccatattaagccctgaagaagctgaggccgcggccaatgccggagcaaaatacatcatatctcctaatatggaccccgaagtcataaaaaagacgaagtctttgggactggcctccatgccaggagctatgaccccctcggagattgtagacgcttacaaaaatggtgccgatattgttaagatattcccggccggaaatctggggacagattatatcaaagcaataaagggtcctctaaattttattcccttggcggctgtgggaggagtcaatcttgaaaatgccggaaagttgctgatgtctggctaccaaatgattgcagtaggcgggaacctggcagacaaaaaggcaatacaggcaggcgattaccgaaagattagttctttagccagagcttataaagagattgtggacacagctgtatagcaaaactaagtaaagcaggtatatctatgggaaatgtatgtataacaatagatgggggcaccaccaatacccgctgtctgatttgggaccaggaggcaagggtcattgccagctgcaaatgcaatattggagcgcgcaatggcgctatggaacacggaaatgatactttaaaggttcagcttaaacacaatctggaacaggtattaacatcctcaggccattcctggagagatgtggaatatatcctggcatgcggcatgattacctgttcctcaggactatacgaattgcctcatttaagtacacccgccggattaaaagaattgtctgagggcatacaaaccatattgcttcccgaagtgagtcctgtacccattcattttattcccggagtaaaaaatcacgtaaaccatctggattttgaatccatagaccagatggatatgatgcgcggagaagaaacggaaagtatggccttattaaggctccatcacaccggcagtcctatgctgctcattcttcctggctcccacaacaaatatatatcggtggatgagcagagccggattaccggatgcatgacttcaatgagcggtgaaatactctcgtccctcactcaaaatacaatactggcagcctctgtcaattgcagttttttggatgagtctgaactggacaggcattggctcctgaacggatataaaaacagctgtgaattaggtataggaagagctgcatttctgaccagggtccttcacttgttctgtgaactttctccacagcaattaggcagctacctccttggaacagtccttgccctagacctggaggctctgagaggttccaaggcaatcatctttaatcacggttttaaaattgtaattggcggaaggggaacaatggcccttgctctgtcccaagtattagaggaagagtatcctaattccgaagttttgctggaccgcaccgaatacttggcgggcatgggagccaggttaatctggcagactatgaacacccgaaaatatattcaaaaaacatcatgaaatttgcataaatgtaaaaaacaccgccgggactccatccattcccggcggctttcctctcaccatctgcctacagactccagttcaggctcttaccctgaagctctgccatgtgatggtatatccctttcttctccaacagttcctccggcgtaccctgctccgccacataaccatcctttagcaccacaatccggtctgcgcctgccacagtcctcatccggtgcgcaataatcagcacagtcttattcttgaccagattggatatggcctgctgtaccagagtctcattttccacatccagagacgccgtggcctcatccatgagaatcacaggggcattctttaaaagggccctggcaatggacaaccgctgccgttccccgccggataaggcagaaccattttccccaatccgggtctcatatccgtttggaagacgatgaataaattcctcacactgggctgccctggccgcttccatcacctcctggtcagatgcgtctttgcgtcccagacggatgttctccatgatggtattgttaaacaggaccacatcctggaatacaatggaaaagcttctaagcagggtctccggctctatcccgctgatatccgtacctcccagcgtaatctttcctctgtcaatatcccagaacctggcagccagctttgcactggtggattttccgcctcccgacggccctaccagagctgtcacctgtccctgtcttgctgtaaatgacacatcctttaaaacctgtttcccctctttataggaaaatcccacatggtcaaatacaatatcatatccatcgtacgcagcttccctgcttccctgctgaacaggctgctcctcaatccccttcatccgttccaccaccagcaaagcagagtacacagccgacaggttctgcagacagccggtaagaggtccgtacagcctggtggacgccaccataaacatgaggaacatcataaagccgatggaatgggatgacagaagagcagctcccgccagtaccgtggtagccatgccgactttcaggaacatctgggacgctgtgaccatggtgccgtttaacagttccagacgtatggtgatggattccacgttcagaatcttctggtccagccccctcagatactcctcctgctggttgttggccctgatgtcctggatattctcaatgcactcctggattccgtccgaagcagcgattttctttcccttctgcctgcgctccacctggtccaccatgggtcttgtacctgctgccagaagaaaggatatgggaaccacccacagcacagccagccccatccgccagtcagccaccataagacacactcctatgatcgccgtggataggaaggcccctatgagttcaggaataaaatgggaaaatgccttttcaataaacgcgctgtccgccataatggtggtggtcaaatccgccagatcccgttttccaaaaaaagacatgggcagggttctgagcctctccgccagacgaatacgcatattggcgctttccgtataggatgccacaaaggtagcgtcatactggattctccagaaaatgaatattataaccagcagtacaatgcaggctgccacatacccggccattcccagggaaggagcctgaatccccaccaacgggcccagaagccgttccataaagaggaacaggattcccatggggaatatcagccccatattggtgaaagcacaggaaaatatggcctttgtcagatcccttcctccctgttcgctcaaggcgaattttttctgcagatacttgctcatgcctttccacctaccttccactctgctgatgtctgataatccttccacatttttgcatacagccccctggccttcaaaagttcatcatggcttccctgttcagccacacggcctttctccatcacgaagatacggtgagcccggcacaccgtagacagcctgtgggcgatcattatcacggtcttgccctccaccagcttctcaaaggccagctgaatcagatattcattgtcagggtcggcaaatgccgtggcctcgtccaggagcacaatgggagcgtcctttaagattgccctggccagtgcaattctctgcatttcaccgcccgacaggtacacccctttggttccaaccaccgtatccagaccctggggcatcttcttaataatgtcctcacatctggctgccttcacggcccccatgacttcctccttatctgcctccggttttgccgcccgtatgttgttcatcagactgtccttaaatagatggctgtcctggaatacaaagctgaccctcttcatcagttcttttgtctccatctccctcacatccacaccgccgatacaaatgcttccctggtccacatcaaaaaaccttggaatcaggctgaccagagtagtcttgccgcttccggaagcccctacaatagctgtggtggctccctgcggcacagtaagagacacatgctccagagcgtttacaccgtccttgttataggaaaacgagacgtccttaatctcaatcctgtgattttcaggcttcctgggagctgcgggctcagaaagaggcttctctctgataacattcaatattcgctccagcgcgtcattggcagccatggtattttcactggtccacatgattttgtccatcatagtcacgcagacaggtgtaaacaggatatagaaaaccagatccagggccatggtcacaaaaccctgcccgcccgccgcatcccctgccaaaagaaggcccgcaggtatgagaacggcaaatatgctgttgatgctgaccgaataacagcacatgggaattctgagggacagggtataattcacagcccagttcttatagcgcatgatggaatcatgaaagctcttaaaggaaaaaatgctctgctggaatgtctttaccacagggattccgcgcacatactccacggcctcgctgttcatgtcctccagggcattctggtactgcttcatgcaatctgccattcccgtccccatcatcctgctgaggaaaaatgtacccaccgccatgggaatgaggctgataaggccaaatctccagtcaaacaccagaagaagtaccagcactgccgccggcgtcaccaatgctcccgccaaatccggtaactgatgggccagataagtctctgtctgtcctgccccgtcgtcaatgatacggcgcagttttccgcttccggtccccctcaaatagccaatgggcagctctgccaggtggtgaagggcagccgtcttcatatttctggctgtccggaaggccgaaagatgggtacacataagagccccaaaatagataagcatgctcaggagtgaggaagccaccgccatccacccccagtaaaccagcgttccgccggccagtcctcccggccagttcaggaccgccagctttatcaccttccacatgcacagatacggcaccagcgctataatcgcgctgatacctgacagaatgcatcctgtcactgtaaggtatttatacttccctgcaaaggtcatcagagtcaccttacctgtatcgggaagccgtgtcataatatgtttcctgctgccatccactttttcatcctccttttttgttagttataactaactcattgttttaaaaataaggctgtcaggcttctgccttccggctttccgccctcaagccccatctcttactcacccaactccatgattcgcacccagcccgcatgctgaaaacggcttaatgtgacagcacaggtaattgcctgttctctcggcaggtcgtgggacacaaattcatggagctgctggaaaaaggacctgcacagaatatgaatcagtgtgttgctcattccttcagccgaatgccccaaagattccatagcttttataaaatcccggcaggactgctcctccaccgcggccagcctgtcaaaataacggtccctggcttcctgggcgccgcagcacagaagcagcttgaacacctcaaaatgatcatagatataattcaccatccagggtatgtactgctctgtaatctcattcagcctggctggctgctgttcaggcggcagcgcagcaaagtccctgtgctctttacggtacagatccagcagttcctccgccgtatctgaggtcagcgcgtcaaacaatgctttcttccccggaaaataaccgtatatggctccggttgtcaccgatgcctcctttgcgattctcctgagcgacgctttctcatatccatatgtgagaaattccttctttcctgcctccaatatggcagtaaccgtaccgttgtacctgtcctccatgacaatcactccaaccttttcccatatctttataacactgttatataacatggttattatggtacaaaaaaaggcatccgtcaatacatataaccgataccttttctcattaaaccattttatctgtttttttgaaaaaacttctcaaaaccaatgaatgcagcgtactttctcagcccttcatccaccatctgtccgggacctgccatattgtagagggcggcttataagagccccaccagctccaggctcggttttaaagtatctgctcccggctgccattttgccgggcatacctgatcaccgtgctccgccacaaactgggatgcctgaacacgtctgaacagctcgtccgcattcctgcccacatttcccgcgattacctcgcaggcaacaatctttccttccggattcacgataaagcttcctctttcagccattccgtcagcctctatcatcacatcgaaatccctggccagactgcccgtgggatccgccagcatgggatacttgattttctgtatggtccttgatgcgtcatgccatgccttgtggacaaaatggctgtcgcaggatacgctgtatatctcgcagccggctgacttgaagtcctcatacttatccgccaggtcctccagctcagtggggcaaacaaatgtaaaatccgcgggataaaagaaaaatacagcccacttccctaaaacatctgatttcttcacttccctgaacgctccgcctgcataggcctgtactgtaaaatcgctgatttcttttcctattaatgacatattgtttcctcctggtttttgtgatggtttactgctgccttgccttctatcccgttacccttgaaacagaaatccattgcccgctgcccggttgttagttttgtctaatttactcatattttaccagaactaatcccttttgtcaataaataatattgataattattattaatattgtttattttgaaaaacataaaaagaacagccagacaagtttccccatctggctgttcccatgctgcgttattactcctcaaacgaattaatgacggataattccggcttcatatcatacttcttcttaaatactatggctcccacgattccagccagggtaccgctgatggcagccagcagcagcgccataagtacctttaacggcggattgaaggcaaagggcgccagcagtcctggtatgggagatgctgttcccggggcattgttgataatgcccaggaatgcggcggccactcccgaaaagcctcccccgaaaaagttggaacaataaattggtatgggatgctttgttatgatatgggcctgtgtcagcggctccatcataacagctgccacgttgctgttatccccgaagtggagcattttaaagatgacaccattggtaaaggaaccgccgaagcaggcaatagctgcaatacccatgggcagtcctgtaagtcccagcatggcggtaagagccatggaactgaggggagacgtacaaatcatcttgataacccctcccagcagaagtcccatgagaatgggcgactgctctgtagctgccgaaatcatgccgccgatgtgcgccagggctgcattcacagccggatccaccaggaaggcgatgaatctggcaatcggtgcaatcatgagagcacccagcacggaatccaggcccggcggaaggtgtttctcaataaacggcgcaatgaagccaattgcatatcctgcgataaatcccggaaggatgccgtatcctcccagagcaacaccggcaactactgcaaatacgggattcactcccatgcctatcggtaccataattgccgctgccacgccgcccatgttgcccgatatggtgcccgtttccccaaggaatgccaggtgaagcaaatctccggatatgtacctgtggacagcctccacaaggaaagttgcaactgctgcattggccattcccgacatggccgctgaacctttgggcgccttcatactgaaaagtgagaaagctgccagcgtcaataatagtaatcctaaccccgtaataattgtcataaatctacgttcctcctgttttttgctctccgcagatatgcttggccgctttccaccacagaccgccgttaccgctgtgatagctcttaagctaaggtatatccttggtagagttttcgcaatgcaggtaacgaagaagtccccaaaattgcaaaaaaacagagacagacataaacgtagcgtagatgtctgcctctgtccttttacctgaaagtttccctgacgcggttgctgctatgccgccggttgcttcatcggtattcacattttagtgaccttctccagagtcccgtccgaattcgattcttttgcctgagagtttgcgcatccccttcggcgttacctggcggtaatctctcccgaattcatcaaccggtctgtcattaactttgtttatattttaacatcaaacatagaaaaaagcaatagaattatgttcagtttatttctttttcacaaaaaacataccgtttttttatgcatacggcacaatttttttcacaataaatgacagaaaataaacatatgtccatttactctcttccattcccaaaataattgtaaaatacaggaagggggattttattttttttctgtacgcgccttcaaaaatcaatccagaagattggtcatgctctttaaactgatagccagagtggatgtattgtggagcatagctgatgcggccggggttatgacgcctcccactcccagaagaataagacccaggttgaatccgataacaaaccggtagttccggtcaatccggtccatgagtgcccggctgatagccctcagtgtcaccagttggaacaggttgtcctccgagatggtgatatctgctatctccctggcaatctcagccccttcgctgatggcaattcccgcgtcagcagccgacagggccggcgaatcattgattccgtcgccaatcataataaccttgcggccctttttcttttcttcgtccacgaaccgggccttgtcctcgggaaggacctccgaataatactcgtccactcccacccgtccggcaacagcggcggctgtgcgctcactgtctcctgtcatcatgacaatcttggtgattccctgcctgtgaagggcggcgatgaccgcatccgcctcatccctcagagggtcctcaatgcagataacggctgccagacttcctccgatggccaggtagaggtgggaatattccacgggaaggctgtcaaataccgttctcttatcctccggtatcctgcacccctcatcttcaaacacaaagtgatagcttccaatcaccaccctttcatctcccacataggtggcaatgccgtgtgctacaatataatccaccctggaatgcatctccttgtggaccagcccccgcttcactgcctcatttaccacagccttagccatggagtgggggaaatgctcctccaggcaggcagcaatgcgcagcagctcttcctttcccatgtcattgaataccaccacatccgccacctggggcctggcctttgtcagggttcctgtcttgtcaaagataatggtgtcggcagcagccactgcctccatatacctgcctccctttaccgtaatatggcagctgccggcctcgcgcatggccgagagcacagacaggggcatagccagcttcagcgcgcaggaaaaatccaccatcaggatggacagggcctttgtcacattgcgggtcagcagccacgtaaggatggttccgcccagactccagggaaccaacgcgtccgccagggtggctgcctttccctcagccgtggacttaagctgctccgactcctcaatcatggtcacaatccgttcaaacctggtgtcgcccgcagccgttctcacccgcagggtaatctctccctcctctacggctgttcccgcatacacgtaggagccctcctccttcctgacaggcactgattcccccgtcatggaagcctgattcaccatggcgtccccggaagcgaccactccgtccagaggaatcacatttcccatatggaccgttaccaggtctccctccctgatttttgaaacaggaaccagaacctctgtcccatccacattctgccataccccggcaatgtttaaggacatgctcctggcaaggtcgcccactgactttttgcgggtccattcttccagaagttccccaatccccagaaggaacataacagaacccgccgtgtcgaaatcccgtctcaggacagacacggcaatcgctgcggcatccaaaacctccacctccagcttgcccctgagcagacagcggactccctttagcaggtacctgacggagtgggcggccgtacaggcggctctgacagaagccggcagaaaggatttggcaaatgccctgaccaccactttccggaccagcttctccttgtattcgcggttcagggcccttccgctgttcttcggcaccagctcttccatccgctcactatcataagaaaacctctgtattccctccagtatgcacctgcggctgccttcatacaccacagcggcatccgctgttctctcatataccctgacattttttactccgggaagggtgcagagataataatgcagcaaatcagcctgccgtatgctcatatccttctgataaaaatgaaccctgacccttccccttatctcatgtctaattacaaacttcattgtttcaagctcctattttcaactgtcctggacacattttcagagtaaatgaaaaaattaccgcccggagatttcttccccaggcggattatacattacgctgtaaccgtatcagcagaagctgtctcatcttccttcaaatattctgaggtatgctcaggggactcctccctgctttcatcctcaaatacctcctgacagcgctgtgcattgatttccctggcctctgccagaatatcctcagcgttctcctggatattggaggcggtggtcatcacacagtctttagcccttaatccggcagccaggcagttgatatataactttttggcatcatcgcttcccagaatcttcacacctgctgttccaaacaggacgccgcctaaaaaaaggcccatttttttacatttaaaacaatcgatcattcctttatcctcctaaattatatgtaaacaatccttatcaggcacaaaagagtatgcagggctgttatgatgctgtcttggcctttacattcacattaagagaactgccctctttataaggccttactaacagatagatgaatacggccacggccccaattgccgcaacggttccgactccaaaggttccctctgtaaaccatctgccaaactggtatatgcacagtgccaccacatatgcaagtatggtctgataaccgattgcaaaccaggtccaccttgcattgttcatctcacgcttgatggcgcctatggcagcaaaacagggagcgcacagcagattgaacaccaggaaggaatatgcgctgacggctgtaaagctctgggccagtgttccccagatttctgatccgtcctcagccacttccgcaaaaccatagagaatgccgaaggtgccaactacgttttcctttgcaaccagacccgtgatggccgccacagctgcctgccagttcccccatcccagaggagcgaatatccaggcaatggcctgaccgattgacgccagaattccatccgacaaatcttccaccataccaaaatgtccgtccacaaacccaaagctggatgtaaaccaaataaaaatagtggacagcaggattacggttcctgccttcttgataaaggaccagcctctctcccacatgctgcgcagaacattcgacacagttggaaggtggtaagcaggaagctccattacaaacggcgccggatcccctgcaaacatttttgttttctttaagatgatgccggagcagataatggctgcaattcctacgaagtaggcgctgggtgctacccaggatgcgcctccgaacagggctcccgcaaacagcgcaataataggaagctttgctccgcatggaataaaggtggtggtcatgatggtcattttgcggtccctgtcattctcaatggtacgggaagccatgatgccgggaacaccgcagccggttccaatcagcatgggaataaaggactttcctgacaatccgaatttccggaaaattctgtccatgataaacgccaccctggccatgtaaccgcaggattcaagaaacgcaaggaaaataaacagcaccagcatctggggcacaaagccaagcacagcgcccacgccagccacaataccatctaatatcaggctggagagccagtcagcacagcccaccgcggcgaggaatccctccacaacaacaggtatgcccggcacttccaagccaaacagactccagccttccccaaacactccgtcgttagcccagtcagtggcccaggttcccacggtggtaactgaaacatagtagacaacccacatgaccgccgcaaatataggcagagccaggaaacggttggtgacgatatggtcaattttatcggagacgctcatcttctctctgctcttttttgtataacacctgccaataatggatgtaatgtaggtatagcgctcatttgtgatgatactctcagcgtcatcgtccatggcctcctccatgcgcgctgtgatgcttcccacatccggaaccatggtcatctgggccccaatcttgtcatcccgctcaaacagcttgatggcatagaagcgcctctgcgcctcaggcacatttcctccgatgcattgttcgatttcctccagagccgcctccacatcggcgcagaatttgtgtaccggtacagatgctctgctgtcccttgcaagctccactgccttgttggcggcctccatgatgccggtgccctttaatgcggaaatctccaccaccgggcagcccagctccctgctcagagcctgaatgtcaatccggtccccgctctttttaaccacgtccatcatgttgacagccatcagcacgggaatccccagctccattaactgggtggtcaggtacaggttgcgctccaggttggttccgtccacaatgtttaagatggcatccggccgctgggtaatcaggtagttcctggcgaccacttcctccagcgtgtaaggcgacaatgaatagatacccggaaggtccatgatgatgacatccttgttccccttaagttttccttccttcttttccaccgtgacaccaggccagtttccaacaaactgattggatccggtaagaccattgaacagcgtggtctttccgcagttgggattaccggccaaagcaattttgattgacattttcatatcctcctcattctcttattgagaaaatttatcaataaattagttgtagctaactcattcttttaaaaaaaagcagtttctactgcacttcaatcatctcggcatccgctttccttaaggacagctcatagcccctaacattcacctccacagggtcccccagaggcgccaccttgcggacatagacttccgtcccttttgtgatgcccatatccatgatacgccgctttacggccccttctccgtgaagtttaacaaccgttaccgtgcttttgcattttacttccttcaatgtgcgcatcttattaatgctcctttccttctcatacccgcggccagcttacaccataatcttattggccatctctttgctgatagcaacccttgattcctttacattgacaatcacattgccattgttagctgaaacaacagtcacactcgctcccggcacaaaccccatgttctccagatgacgctttacctcttccttgccgcccacccggactatggatgccaccgtaccttcttttaccaatgtcaacggcatacccatcactcctctttctgaacctgatgtgattctgtttcctgaaatttctatattgcagctggaaagttatggtatcctaactgcaaatttaggttagcaccagttaaccgaaatgtcaatcatttttttcaatttaattgcaggttttttgctctttcagacctggcgctaatttgcgtttcctttccgggtatgataaaatagaaaatagccgccgcagactttgaactaactaatatttatcagtgggaggatttgattaaattgaaaatacaggaatcagctgaaaactatctggaaacaatcttgattttaagccgcaaaaacccctatgtccgctccatcgacatcgccaacgaactggccttttccaagcccagtgtcagcgtggcaatgaagaatctgcgtgaaaacggttatatcctcatggatgaccaggggcacatcaccctcagcagtatgggtagggaaatcgccgaaaccatgtacgaacgccacaccatgctctcccagtggctcatgtaccttggcgtggatgaacagacagccgcggaggatgcctgccgcattgaacatgtggtcagcgcagaaagcttccgggccatcaaggaccatattaccaaggggcatgagcttccggaagacattttataaggcacgcggtcagaaatattcctgctgctggccctgttgttcttccgggttccccggaccgccggtcctgatatacacactttccggccgccccttggtggtggtcctggtcttatatgcaatcttcagatatccctcctgctccaatacagccagaaaacggttggcgctccgcttggtgatgcccagcctgagcgcaagggtcctggctgtgatttcctgcttttcggaggcgctgatagcagtaaatattttctttactgtcaggggtgaaagcttggactgcacgtccagcacctcactgttgtccacattaaggagaagctggccgcagtcccccatgggaccaataatctgctccctctcattgatcaggtatgccagagactgcttaagttcagcctcatggcaggcgtcaagagcatttaaccgggcctgtgaaagactgttcccaagaccgcagccgatgctgaaacgggcggacagctttttttccctcagaaacgggctgaggcggtcctccttaaaatctccggtccagcccgaaacatgtttcttggtagacacgatttccagcccgtaatggcgcctgtggaccgaacagtcaatcatggatgcccctataaattcaatcacaagattttcaagcctcatgtaatcataatccaggccctggaacatctcgccgccggaaccattttccgacagtttcacgatgatgactcccggtatctgctcctccagcttcctgcgctcaatctcattgagaagcttgtcgcacatctcccccacataccgtttgctggggaacgggaaatagaccttcacgccggcctcctgcagtgccggcacaatactggaaaaccgcgtgacggataaatcaatctttccttcctcccagagccttacatgtttcccgtactcctcctgctcaattcccagcatccgctccatgtcaaattcatccgctgaaagctcccggatatcgggcatggggctgcgcccctccacaaaatcctttagtcccactccgaagatttccacaatatcagcgtaaacccttgtaaaatccaggtttctgttctcatttaacagctttagaaataaacggtacagggcagcctcatcagtgttgaaaaaacagatggggcgcttttcttctttataataaagatgtatcatgtgcgcaggaaaactgccggaagtcaggatgccgtcaaactcctccgtaacattttcatagatatactgtatatctgaaaatgttttatatgtaaatatgcaataatcaacgtccaggtccccaagcatggactggagaaactcttttatatattctgttgcgatgactgcaatctttctcttcaattccattcctcccaaaaccgctttgtcttttatcttaacatagcaaaggaaaatccgcatcctccaaatggaaaaatccccggatttttgtcaattgtgcatataaatattttttatccccttgacaaacatggtctttttgctataataaagacacgtctttatatagtctttttatattccaaggagggtaccgcaatgaacgaattcttacgacgagcaaaggaactcgaacaccagatgcagaaggaccgccgctacctgcaccagcatgccgaagcaggggaacacctgcccggaaccactaaatatgtcatggaacgcctttcttccatagggctttccccccgggaaatctgcgactcaggcatcactgccctgattgagggcagctgccccggcaagaccatacttctcagagctgacatggatgcgctccccatgaaagagatgaacagtcttccctttcagacagtcacggaggcggcccacaactgcggacatgacatacataccgccatgcttcttgctgctgcccagattctgcatgagcgcagagatgagctctgcggcagcgtcaagctgatgttccagccggcggaagaggtttttactggttctgagaacatgattaaggcgggaattctttccaatcccacggtagatgccgccatgggcatacatgtgatgttagataccccggttccctccctcaactatggcacgggcttcatgacgtcctcctgcgacggttttaaaatcacggtaaaaggtgtgggctgccatggggccatgcctcatctgggtattgatcccatcaatgtgggctttcatatttacagcgccttccagaatctcatagccagggagtgtgatccaggcgagaaggcaagtcttaccctgggtgcgtttaatgcgggaaacacctccaacattattcctgacagcgccgtactcatgggcaccctgcgcacctataacaaggatttgcgcgccaggcttgtaaaaaggatgcatgagattgcagaatacacgggaaaggtctttggagtggccattgaatacgaatccctctccgaggtgccatccacctgctctgacccggatcttaccagggagctggcagaatatgcctctgaggtggttcctgatttcatcaaacacaccgattactccgtaacaccttccgatgactttgcccgcgtgtccgaaaaggtccccaccgtctacttcatgataggatgcagggtggatggatgcacggtccagcaccataatccgggcgtattattcgatgaaaccgtcatgccctacggggccgcagtacacgcagcctgcgcatttaactggctgaacaggaggaacgcataatggaacgcaaaaaaatatactatggctggttcgttgtctttggttgtctcatgattacatgtaccatggtcccccccatcatggcgctcagcaataaattcctgatacaggttacgggtgagctccagatttccagaagcgcctttaccctggccaataccattctccagggtctcggaatcttcctgtcccctgttgtgtcggccaggcttgcaagaggcaacatgaaacggattcagaccgtcagcattatcggctttgtcctttcctacgcttccttctcccttgccaccaatgtgattcatctatacatttcctccttctttaccggtattttctttttaaacgcttccctgattccggtgagcatgatgattaccaactggtttgtcaaaaagagaggacttgccatgagcattgccatggcgggaatcggcgtgggcggcaccatcttcagccctgtgatcacatggctgctgggggcatatggctggaggagcacctaccggatcatggcactcattatcctggtactggcccttcccgctgccctgttcatcctcagaaaacgtccggaggacatgggacttttaccctatggcagccaggattccaccattgagagttcctcccttcaggattcctcctccagggatgccgcctccaagcgaatcccccaaaaggcagacgtggtgtttccgctgagcgtaaaggaatccaggacaaagctgttctttatccttttcatattcggcatgctgtgcaacggactgattaatacgggctccctgggtcacttccctccggccatcgaggaacttcagggcccccaggtacaggcattaattatctccctgtattccatgattggcattttcgggaagctggtccttggatggctcaatgacaggttcggcgttgtggccagtactgcttttggatgcatcacctttgccctttcctttatcttcatcctgtttggccagaatatcagcatgctctacatcatggccctcctcttcggtctgggagatgctatcggcaccgtcacccctccgcttatcacctccgccatctttggcgctgaaaaatacggcgaggcatacggaatcgccaacagctttacacaaatcggcctttccctgggagcgctcatggtggctgccatatacgataccagcggctcctacaacacggcctggattctccttcttatcctgaccctgggcgccttcgccggctggataggcgcatataccgcatccagaaagtactgccgaaagcctgcggcgggcaatacgcagaatatgcaggccgcgcaataaaaccggaagcaaagcgccctcaaaccattcaagtatgcctgaatggtttgagggcgcttctttttcatttgtgcttctttttcatttgtatttaattctgtattccgctacataaagatgccggtatgccgcatgtaaaaagtgctggcagcttcagcctctggaacgtctgtaaaaacattcttatgacaacagtttttcatataattgcctgtccccatccttaaacacattaaaaacaatccggtcaaaggccgctttgcgctgttttatgaatttcgtcactgtatccaccgcaatctcagcccccttatcattgggaaaatggaattccccggtagaaatacagcagaaggcgatgctccttaatccctggtccgcagctgcctccaggcaggaaacataacagtttctcaggtcctgtttcagttcttttgtcagcctcattcccaccacaggtcccacggtgtgaatcacataccggcagggaaggcagaaccccggcgtcagcactgcccttccgacaggctcctcataatccgggtcctccctgcgcctgtcatccatataccggctgcaggcctcacgcagcctcagtcccgcagcggaatgaatggcattgtcaatacagccgtggcagggcacaaagcaccccagcatacggggattggccgcgttgacaatggcatctgcctgcagccgtgtaatatcgccctgccatatggatatacggtccccaaacaggacgccgcttccatattgctcctttacggttggtatgtcagccaggctcacaattcccttttccctggcttcctccctcaggaattcatcctgaatctccaggaatccggcaggcagtggcccgggcatacggatattcataagggaacgcatgaccctgcgccggtcccggggccttacctccatgtccctgaagctgaccgaatccttcttaagttcttccacaatatagttaagacgtgcttcctggcccatctgcttcatggctgacagctcccttctccccaaccggccccgttattgcatcctgcgtctgttcctgccagatgctccagcacatgcgcgatgtcagccttcagcaccagtgaccggtccatgatgtcatccggcacccacgcctgctccagattgacgctgatataaaatgcctgtttccactgctttgtcattctccagaaggggtattttataatgccgggcgtgttcatacccacccctaattccaggaaaaccagtgttttttcctgattattgcgcagaaatgtttcataccgtaccgctgcccggtaccacgcctcatcctccacaaagttaccgtcgcacctcagatgtacttccatgtcgcctccgcacaccggacacttgggcacctgacaggagggaatcctgcagtccttctgttccctcagcatggcccggatctgcgcctcattgtcatacagtttcttatggcatgcctgtttgcactggaacagcccgtagtctccctgggttgcaaatatacactcgtcctgaaaaccggccagccagaactggtggtccacattggtggtcaggacaaagtggtttttatccttcatcatcgcatacaaatccctgtacagctttgccgccggcatgtcgtacctgttataataaatatggcggctccaataggcccacttctcctcctgggtgggaaacggatagaaccccgccgaatacatgtccctcatgccgtaccgctctatgaattccctaaaatgatcctcaaaccgcctgcctgcataggtcagaccggccgcagcagacaagccgcttcctgctccgatgacaacagcgtcagcctgctccagacgccgtttcagcgccaggagacaatccccagtattcaatatcatcccgcctttccagggcctccgcccaatctgactccattataacctgttggggagacgcggtaaactacgcactataaagtgccatggtatataaaagatactaaaggtatgccggcttccggacagtctctatgatttgcggacacctgtcagagtttctttaaccgttccatcaaaagcttcatctctcccatatccggctccgcggcatcccagtccccgccaaaaaaacggtaataggaaaacagctgctccagctgcagccagctcccgtccatagccgcagacaacagccctgcaatgcggttgaccatatatttgttcaatgtcttcatatcctgctgggacagctgcccattagcatgcatgtcctcaaccgggccgtttctgaacgcgtaatgagtcactgccttggaaatagcgtcaatattttcttttctgagcagccgttctctggaattttcgttcagctgtgcaaacagctccggattttcatccataaactgctggtatatcatatttttaatggatatcccatacttccttctcttataggccactttccccatagagaccccaaaccgttctgcgatctccctgtccgtcttgccttcctcatagtataaatgcttcagttcttcctctgtcaccctgtcccattgatattccatgtttttctccaaatcacttcgcgtatttaatccacttttgtacaggcggtaattccatgttccggcttcattttattataaccagccccaggtaaaaagacaagttaaaaggcgggatacttaccgcatcccgccttcctgcgtctccgtctgataatcacatacagataatatatctccactttttataatccctgtatgatggccgttaaaatcgaatcatacttgtcctccggcgtatctgtcctgctggtcatgaccaccggtactgtggtgccgttcaaggtgccggaagaaaccatatgggcaaaataggtcagcgacttggtaaatatattgcctgcgcataaatcaggcatcaaaaggatatccggctgtcccgccacctggctggtgattcccttatgcctggccgcatccgcgctaagagcattgtccagagccagcggaccgtccacaatacagtttttaatctgtcccctctgagcagccatactcagcatggccgcatccacagtagactgcatcttgggatttaccacctccaccggagtgataacagccacctttggacactgaattcccagttttccagccagcttcactgcgttgttaatgattttcaccttttcgctgtaatccggcgccacattgaccgcacagtctgtggcaatcatcaggcggccctggtactccataactgtggcctggcttaactggcttccatccggcacgaaaccataggcctccttatccagaatggcccgcatgaagctagcggtctgcataagtcccttcataggaatatccgcttctttatccttcaccatcctgcaggccatcctggcagcttccctctcatcctggcagggaataatagggtaatcttctgccacttcccccatttcggccagcagctccctgattttgtcctctttgccaatgagaataggctctataacgccccgcttcctggccgtgacaacagcttccaagacatcttcgtcatgggcattggccagcaccaggcgttttttaatgttttggctcttaatataatcttccatttcctgaaaattatgaaacatactgtacttcctcctggtcatcaaccctgttattcattcagttcctttatctcctcttccccacgcagtgcagccagtgtgttaagtcccagtgactgcatttcatattccccgggataaactgcaatgggagcgatgaaggaaaccctgcgggaaacgctgtccacaattctttttgagtgggcaatcccgcctgtaaatacgatggcatccacctcacccataagcacggtggctgccgccccgacttccttggcaatctggtagcacatggcgtccagcgcctcaccgcaggcctgatccccgcctgccgccctctcctcaacggtctttacatcattttcgcctacatatgccataaggcccgcgtttccgttgataagcctgcggatttcagaatatgtatatgttccagaataacacatattaatcaaatctccaatgggtaccgaacagcacctgttggtggaaaagggtccgtccccgtctatagcattgttggcatccaccagccttccttttttatgggcggcaatgctgatgcctcctcccatatggatcaccaccagattcagttccctataatcctttcccgaatccttagcatactgcctgcccgctgctctgtggttcagcacatggaaactgctgcggcgcttaatctggggcagtccgctgtagcgggccagaggctcaaactcatccgtagtaggcggatccacggtaaatgcctggggaccctgagctgaaaactcataggccagcttaaggcccaggtccgtggcatgattgccatatttctcactggccgactgctccagcatctttctcgtaattcggtaaacgcctcccacaatgggctctgtgtgtcctcctctggtgaccaccgcgtcaaggccggatatgaggattcccttttctttcagataagcttcgatggcctgtttcctgaattcaaactgttcccatatagttgaaaatccttccagtgccctggcagtatggacgatgttgtccttgaacacgcagttctcattttcgtaataggcaatcttagtggaagtggaaccaagattaattgccgcaatcttatatatcctcatatgcatacctctctcctgttcttcctaaatgatatgaagcccgatggccccgtacataaaggctaccataatgggaatccaaagcaccgctatgacaaatcccacctttgtcatctggcccagcctccaatagccgtagtcgtaggtggccatgggaatggggtccaggggcagaaggaagatacatttggatgtgtaacccagtatcaataccagatacatgggattgattcctgccttgtctgcaaggataacaatgagtggcacgcacactgccagcaccgcgttgcctaccggtaccaggaaatgtataaacaggccgaaagcagtcaccaccagcataatggacagcatggaacttcccaccagaccgcccaggaactggttgctgatccattcagcgctgccctgctggctcaaaatcatggcaagggcattggatgcgcctacaatcaaaagtccggcccatccggtggcgtccacggcctttttccagtctattaaatccaccttaggcaggaagaacaccgcagaacaggtcagtgatatcagggttaaatccagctttgtccaggtctgggtaagccatagaagcaaggtgataccgaatatgacagagaacttcttctcatcgccggtcaggcttcccagctcctttcgtttctctttaacattatccagcccctgcacctcctcgatttctggtttcaccatcacagtaaggatgaaccaagcgatcagggtcagcaccacggccagaggagcgcctatcagcgtccattgcaggaaagtcacatcctggcccgctatgttcttaagcaggttaatgcacagcacattgattccgctgcccacaggagtggcaaatcctcccagacaggccgcaatgggaatacccatcatcatgcttcggccaaatttggacttgccgggcagacagccattctcctttaacagggtataaccaattccgctgagaataatggtggtggggatatccgccagcaccgtggatatggcggcagagcatatcatgaagctcagcagcaccatcttactcttctttcccagcatgggagtgatgtataaggatatcctgtatcccagcccgcagtcaatgaatgccctggcaatgattccggaggacagcataaagaagatggtggttattccaaaattctgcatcaccacatttgtggtctgtatgccggccaggccgggtataaacagcagcaaacaggatgcgataccgataggtatgaattcagtgacccaggtaatgatggcgcacaccatcaggacaatggctctccacccttccacactcaacccctccggaggagtcatcctgctgcagaccacatagagtaaaatcgtaattatcatccaaacatattttctaaccccgtttttttgttccataattacccccttacggcgccccgcggatgggcgccctctcttattctgctcccagctgctttttatagttttctgttatatattcctggaatgactttacctcttcctctgtgattcccttaaaacgcttctgaagcttcaggtattctcccagtggctttaactccttgggctttactgtcacccggaccttgccctcttcgcattcatagagcacccaagccccagtctgaacagccagcctggccacttccacactcttagccggctcatatccccagccggttggacacgggcagaatatatggagcagacgcggccccctgatatcctttgccttctgcacctttttgcgcaggtccggtatattggcaatgctggcagacgcacagtaaggaatgccgtgggccatggcgattcccagcaaatccttcttacacacgctctttcctccgggtgtggtggtggtccaggcccccaccggagtggcggagcttccctgaatgcctgtattcatataagcctcgttgtcgtaacagatatagagcacatcctccccccgctccatcataccggacagggactggagcccgatgtccagggtcgccccgtcgcccgcaaatgccaccacatgggtatggtcatttccctggaccgcatatccggcccgtatgccggtggcaatggcagccgagttctccagatttccctggaaagcagaaaccttgattcctgtctcgcagccaaatccgcagaacagggcggaacatcccggcggtatgaccagggtggtatcctgtcccagcacatccagtacattgcggatgatcagttccatcccgcagcccgcgcaggcgcttactccatgagccacatatccttttgattctgtccttatatctatcatgctttacgcacctccctgattcccattgcatgctctgtatcacagtcaatccagacgggttcctctgacggttctcctgtcagtatgtcctcgtacaccctggttatggtgtccaggctgatgtccctgcctgccaggcccccaatataattcttgacaaggcagtctccgggtaaagccgactttgtctctgtccaaagcggcgtaccctgtcctccaaacccggtggtgcggtccagaacagccaccttcttaatgtctcctatgacgcttcttaacttcctgtatgggaatggacggaaggataccaccttaaccacacccaccttcctgccctgggcccgcagcttatcggatatatattttgccgttccggccatggagcccatgcatacgataacggattctgcgtcctccatgttgtagccttctaccatggatttcctgcgcccgaacttcctttcaaattcctcaaacacctcttccatcacagcctctgcattcacaaaacccctggcctgctggtacttcatctccgtgatctcattggaacccgtcagattgtcgataaccagaggatcttcaggatccagatacatgttctttctgcagtattcacccacaaacgcgtcgatttcctcctgctccggcaccaccagcttctgcatggagtgcgaaagaaagaatccgtccagacagaccatggccggcgtcagcacccgttggtcctcagcaatacggtaggccataatcatagtatcgtatatgtcctgaacattctcgcagtacagctgaatccatccgctgtccctctcagccatggaatcctggtgatcgcaccaaagactccagggtgaagccagagaacggtttaccacaggcataacgatgggtacccggcagccggaaaccacattcagcacctcatgcatcagggccaggcccacagaggctgtggctgtggcacaccggattcccgtaagctgagcgcccagtgcgcagctcatggccgtatgctccgattccacccgtatgtattttgcatccagttccccgctgtcgcacagctccgacagtttttccgcaatggtgctctgaggggttatggggtaagcggaaaccaccttaaccttcgccatcctgatggcttccaccgctgccccgtttccatccaacatcttgtaatgagccattattccacactcctctcatctatcatcgcaatgcagtgcctgggacattcattggcgcagattccgcaccccttgcagtaatcccacatgatttcaatgcattcccgtttctctttgttcactgtaattacattagccgggcagtacatggcgcaggtgccgcatttgatgcaggcatcgtagtccacctctggccgttccagcctccagcttcccgtattgccggagtcaaatatgtaggcgcacggcccctgtacgttacatctgtcttgtctggttgtagctgtctcttgctgcttttgcatttttcgcacctgccttctctccaaaaaattcaatcaacgccttctcaacagattcaatggataccacaccggtcttggccagcgctcccagggtggaaccattgggaatccccttccctatattgtccaatgccacctgggtcgcattgacataataaacggtcctgaacggaaatgcctcctgatacttccttgccacagcctcgctggacgcgttgagaaccagtatggtttcatctgtaatgcccttggacacatccacatgcttctgtatgattgtctcatccatcaccaccacaatatcgggcgtgtatacaaagcagttcaccaatacaggcttatcgtccatgaccacatcggtgaacaccggagcccccctccgctcatgaccatacgccggaaccgtgattgcatacttgtcttcatgcagtgacactgctgaagacaagactttgcccgcagtaacaacaccttggcctcccagtccatagaattttaatcttttcattatgattcctccttatagtttctctatatgaaatattatttctttatatgaactatatgaattataggtctatttgctttatttgtaaatatacaatctataatattaatttttttcattatttttaacaattttttgtcttattttcataacatccctccggttttttgtgaattttgttttaatatatgaattaccatttctttatatgaaacatatctttttttcataatatatgatagaataaaaaacacaaatctaaaggagggagagtatatgtccgaacaaacctcagatgaaaaataccttttgcaatccgtaaataatgcactggcaatcatagatgtgctttgcgaacacgacaatttaggactggctgagctggccagttacatgaatctgggaaaaagtacggtctttcgcctgctgtatacactgcagcgcaagggctatgtatccaaggaccggaattcaaagtatcatttaagcttcaaatttgcccgcatcggaactattgtcaccaaacgttctgaactgattgagctgatacatcctttcctgatggaactgtctgcgctttccggcgagacagcccatctggtcacctggcattctgacacagaaattatctttgtcgacaaggtaatcggaactgccaccataagcatgcagtccatggtaggatttacccgtacagcccatatgacagccacaggcaaagccttgctggcttattcctcaccagaggttgtgggcacctacatggaactggcgccgtttatcatgcagacgcccaaatccattccttcccgttcagagctggaacggctcataccccaaattcgcgcccaggggtatgcctgcgatgatgaggaatccgagacagggctcacctgctatgccgcccctgttgtcagcatggggcaggccattgcggctatcagtatttcaggcccgtccactcgcatggagcttaaccgtgaccgctatgttgccctggtaaaggatgccgccctgaagattggaaaaaaattaggttattaacagatttcagacaaaaaacacccccggaacagacagggaatccatttcccttcccattccggaggtgttttataatatgttttcattttatagttttatcctgcagtttcatccttacaaacaccaaaagactgtcacagggaatgttcctcctccaaacggaatatacataaccatatcttctgcaaacttcgtataaaggaggtttttgcccatgtgcacagctatggtcacacagacgtcccagggggacatttattttggccggaccatggatttctcttatccccttgagcctgaactgtattttgttcccaaaggctatcaatggaataatatcatgaacacccaccaggtccgcaaccgttaccgtttcatgggaatcgggcaggacatatccccggtggtctttgcagacggggtcaatgagatgggcttcggggccgctgtcctctatttccccggctatgcccagtatgatgtcccggaccctgaggattcgtcccggcctgccatcacagcactggaactcacgggatttctcttaggtttaagcgcgtccgtggaggaagcagcatccattctccgcaccatccgaatcgttggcgccgaagactccataaccggaaccattgccccgctccactggctcgtggcggaccggaccggcaaatccatggtcattgaaaagacagctgacggcctgcatctcatggataaccctgtaggtgttctctccaacagccctgacttccagtggcacctgaccaatctgcgcaattacatgaatctctcccccacacaggagcagtcacagacctggggcagcctggagctgacccccttcggacagggcggcggcagctttggcctgcccggtgattatactcctccttccaggtttgtcaggaccgcatttctaaagactcatactcccattccggcaggcagggatgaagcggcgctgacctgtttccatataatggaaagtgtcagtatcccaaagggcccggtcatcacaagccggaatacaccggattatacccagtacacagccttcatcaatctctcctccagagaatacttcttcaaaacatacggcagcagctgcatcacctctgcatcactgcccggcaatccggatgcacaaaccggcataaaatcgctggcagccctcaatcagcccgccggcttttgccagctacccgcgtctcaggacgcgatctaatacctggtaaagatattccacatccacaggcttggtcacaaagccgtccatccccgcctcagccgccgcgtctgcatcctccttaaaagagttagccgtcatagcaatgatggggatggaaacagcgtcctgcctctgtattctgcggatggcgcggcaggcttccaggccgttcatctcaggcatctggagatccataagaatggcatgataggttccgggactgctctgcatgaacagttccacagcctgttttccgttctccgccctgcgcacgctggcccccttcatcttcagaagctcagtggctatctctgcattcaggtcattatcctcagccagcaggatattcatgtgctccaggcagctgctttccacccctccagccttctgtttctcctgttttatctttatttcttcttccacattcgaatccgccagggaaaatgcagcagaaaaatagaattcgcttcccttgcccagctcactcttaagcttcagttctccccccatcagccccacaatggtcctgctgatagtaagtcccagcccggttccctggctcttggaataattgggtcccacctgctcaaaggctccgaatacgcgtttctgattctccacagatatgcccacaccgttatcaatcacctgaaacttgtagatcacctgctgattcgtgcttttggtccgggtcacacgcatgatgatactgccgcctgccggtgtgaatttaaaggcattggaaaccagattggtcagaacctgctggagacggataacatcccccataagcatacggttttccacgtccttttctacagtgaactccaatccgcggcgcgtagcctctgcggtcagcatgtcctcaagctcttccacggcccggttcatggaaaatgcctcatttgacactgtcattttcccgctctcaatacggctcatatccaggatatcgctgattaatctcagcagatactgggatgaggaccggattttccccaggttttcccttacctgttccggtacatcatccatcattgatgttaagtcgctgagccccacaatggcattcatgggcgtacgtatctcatggctcatcctggaaagaaattcaccctttgcgcggttagctgcctctgccctctccaggctgctctgcatcctggctgcccgtattctggaacgggcagctgccattacaagaatcatcacggcaaggaaaacacatgcagtcaccgttacaaacatcactggattggcatacattaattccacaattgatgcagatcgggaccctatggttatcatattctggtttgtcaatgccgtcttctgttcactgctcaggctgttgaccgacttattcaatattggaagcagttcgccgtcaaccggcctggtcactgcaaaacagatatcatttctgttattaaccagggtattgggaacaacattgggatagtggtgtgcctgcatatcgtgctcgattttggtggagattccgtaaaagaaatcaacctccccattgttcacagcccgcaatgccgccctgacatcaggaaaatatctgatctcatccgcctttatacccgttggcatgcgccgcccttcaatgaccgctcccaccaatccatccgagggatagctgacccccttattcctgacgataatatcactcatggatgcatatgccttggaaagagccagccccatgtctgccccatcctcctcagatcccagaaaagctcctaatatatctgccttgccctgatttaccagattcagcgcatccccataggtgtccgtatactcgtagctgaatttcagccctgaaaattcagttaccttctccaacacatccggtatcaggccgttgtgcatatccgtatcttcttcctggctgaacaggggatgccattccttcacaactgcaaccgataccttttgtttttcgcggatataggcctgctcctcatcattcagacagatgctctcaattccgctgtccggaaaatttgcattataccgttcctctgcgaaattcggattagagtccacaatcttgccgagggccatgttcataccatccagaacctcctgattatccggagtggtcacaatataatacggctgggaatcaaattccgcaactacccggaggttcccctttacatctgcattattccccaaaagcatatccacttctctgtcttcaagacactgataaaggttcccatccaccaactggtctttggaaaagtacctgatggtacagtcaattccattgaggtccagaaatgcctggagccttcgtatgttttcctcagcccgttcatatactccgatcgtcttaccgctcatgcttttccagtcataagtcttaatgcttttatcatcacggcggaccagcagcacggatttattgtaacctgtattgtagtccggataggcaaaatactgttcaaattctggctggtaataggttccgcccatcagatcatactgcccgtccagaaattccggaattatgtcctctgcagccgtatcaatatactcatactgccagcccgtatattttgctatctcattgagatagtccaccacaataccgtgtctggtcccattctcatctgtctccgacatccccttcagctcagggtaggccacccgcagtatcctgtccggtccctgtgccttatcctgatcccccgcacctgcctgcgcatcgctgcatggcagcacagacaacaagcacccaaagaccaggatacacgccattcctgctatcttttttcctgcttgtaatgcatttttcatatcagagctccttcttttgtcccatttctgctgtacagcttgctgttatttattttatcacgtattcagctgacttgctatcccaaaaatggccgccctgcagattaaacagacatagcgcagtactacggcataaagacaaggccccgggcgccgccaggccgcagccggccgccaaaaaagccctggtttccagggcccggcatgataacttttctacaatccaaaacatccaacacctcacaggaacaatccgggtgcggtcaaaatccgcctctacctcattccagcctgtctcagcatccaggcaatcctggcactttcctccagctcttccagacagaagaaggcatccatcagactttttcccggcaccactgccccatgctgtttcagcagatagccgtcgctgtccattacacgctgttcaaaggcgtcaaacagtgcctgggaaccaggcttctcataaggaaccagtcccaccttacccagcttcatcttcagatacggggtatgatccggaattacgtctgtttcgtcctcagcaggcacaaaactccacaataccccataggtgccatgggtatggatgaccgcgcctgttcccggtttcttctggtataccttcaggtgcaggggccattccttgctgggcttgctgccgctcagacttgcgccattcatatccatgactgcaaattcatccgccttcagggtgccaaagcagcttccgctccggctgatgtacatcgttccattgtggaaaaagctcatattggccgatgaaccagatgtcttgctgcgctcaaacaggctccttccaatccagaccgcatcctctaatttctgcgctaactccctatccatcattttccatcctccgtctgcgtcatctccaatactctcacaaaaaaatcttcctgtccaaaattcccggactttaataccaggcgaagcgcctcattctccatgggcaccattaccggcactccgggcgcaacgctggcgccaatcctgtaggaagagaatcccagccgttttgttaccgcgcccgaggtttcccctcctgccaccaccaccctcctgattccatgggctactgcccgttccgccagctctgcggctgcctgttccagcatctcagccacacgctcctgtccatattgctgcacttctttcacattccgggctgtatcggagctgtaaataagcactggtgttccccagttctctctcacaaacctccatgcgtcctccagagactccctgccctcaagcatggccatgggatccatcttatagctgaatccgccgtgggtttggaaatgggcaatctgttccagggtagccctggaacagcttcccgcaatcaggacggcggctccttctgcccgaatatcaagctccggcagtatatcctgacggcggctcagatgctttgccagcggctccagaatcccactccctcctgtcagcagggccaaatccccgaacagctccacaatccgctccccatcctccatatcctggtaatccggtatcacatagtaatgctcctgtgtgtccgcctgatccgagagcatggcatggatttcatctgccggcctgtccatctgctccttccatagctccacgcaggaatacttgctctggggcttcatcagattcgcgattctggcgtcccacatgggggtcagaggatggttcttcatggggctctcatgcagaggcacaccgcccacatacaattcacccttcattaccacccgtccgttgaccggaagcgctgggcacaggaccgtataggacacgccgagaaattccatggccgcatcggcagcagggccgatattccccttcggagtagagtcaaaggtggaacagtatttcagataaaacctctcaaccccctgctcctttaaccaccccagagcccgcagggtatccgccactgcctccccggtatcctgggtcctggatttaagcgctattacaatggcctgtattccctccccaaccctgcttccttttgccggaattccgttaaagagctggaccgacatgcctccctttaccaaaaatgaagcggcgtcgctggcgcctgtaaaatcatcggctacacatccgaatattggcatagtttacctcctgttatcatgaaatgatatattatacaatatatattagcaaatttcatgccaatttgaatcacagccttcctgctttatcttccgctcatatatgttgcaaaaccgttgaccaaattgttgcattattgtagaatcgaaacagcaacaactgtataaccaaccataggaggcatgccatgatccatatattatttattgtaccataccctgaacttcgggaaaaggttgagtatgtcttagacaatcatcctgaaaacaaacgaatctgcgcagacatacaggtattgacagttgaccagatttccaagatcaatgcaggtagttacgatgctgtcatcgcccgcggtttcagcgcaaaacagctgaaaaccatgcatccccaaactcccgttatcgacctggcaatttccggttatgatatcatccgtactgtagctgaatgccgtaaagattttaactccacccggattgctatttgtggattttatggaaaaatatatgaagcctctgacatatgcaaactattaggatgccaggtggaaatttatccggccagcaatcacaaggacctggaagccaacataggtgaagccatcgtccatggctgtgacgcgctaatcggagggtactctgctgtagagctggccgaaagacatggcatcctatcccgcctcatacgtaccggagaggataccatccttcaggcaatcaatgaagccatacgtacggtggagcagatacagattgaacggattgttgctgagacctataagaccatcatatacgcctccaaggacggcattctgtatattgattcctctggaaccatacgggtacgcaaccgtgtagtcaaagccatgaacaacaatatcagcctgctgtcaaagtctcttcagaccacccttccctatctttacaaatcctttagtgaagttttaaagggtggacaggaaataagcggcagcattcttaccatccccaaaagcaacattactgtatccgcctcctttgtcccagtggtggtcaataacaacatttccggtgtcgtgattaccttatctgatattaccgagatacagaagctagagaatcaaatccgccgaagcctcagtgaaaaaggactccgggcaaaatatacctttgacgacattattcataagagtgctgtcatcgacgccaccattgacacggcgcgcagatatgccgcctcggattccaatgtcatcattgtaggagaaaccggaactggaaaggaattatttgcgcagagcatccacaatgccagttctcgtaaaaatggtcctttcgtcgccatcaactgtgccgccctcccggaaaatctgctggaaagcgagctttttggctatgtggaaggcgcctttaccggcagcgttaaaggcggtaaaatgggactctttgaacaggcgcacggaggaaccctgtttctggacgaaatcggggaaatatcactttccacccagaccaagttactgcgtgtcctccaggaacgtgaagtcagaagaattggtgataacaaggtcatctccatcaatgtccgtattatttccgccaccaataaaagcatcaatcagcttgccggtaaagaattgttccgccgcgatttgatgtaccgcctggatgtactgagaattttcctccctccccttcgccagagagaacgggacgctgagcttctgtttcttcatttgatgaggcagcggggacaggagaacggtattcctgttcctgaaatcaatatttcagccttatctgttcttaatgattatccatttaatggaaatatacgggaactgcgcaatattgtagagcgatctctggtaatctgctccggcaatacaatcaccagagatgatttgctaaaggcattatatccccaggatttagaagatacatctccgcttccttcctatactgcatctcaaacctccagcgaagaaagttccattttatgggcacttagagaatgcagcggcaaccagaccaaggcagccagacttctgggaatcaaccgttctacactatggagaaaaatgcagaaatataatataaaaatataattcaattcatgcaatggtgttgcacattttgttgtgatatcgttgcattttttgctgtaatggtgttgcaatcgcactccccctcacccctgatgtatttctcaatatatcgacctttttcttttgtcttttatgaagcttttattatttttaacgattattcatatacttggcataataattgctttagataaatgcatcgggcaataggaacacgccttactctggccctgccggggtggtcagtctccggggtaatggcgctctattccaaaatcaagaagaaggagaggtatattttatgaagatttgcgcgacaatgaaaaaatttcctgggggtatgatggtcattccgctattgattggctgtttagtcaacacgttcatcccacaggtactggagattggaggttttacaacaggtctttttaaaacaggaacctctacactggtaggcctgttcatcctgtgcagcggtgcaacaatcaacttcaaacaggctgcgcttccgctctacaagggagcagtactgaccattttaaaatatgccatcggtgtgttgcttggcctgggtcttaacaagctgttcggacccatgggaattttaggtcttactccattggcagttatcacagccgttactaactccaatggtgccatctatactgccctggcaaaagagtttggagacaatacagatgtaggagcaatcgctatcttgtccctaaacgatggtccatttcttaccatgattgcattaggcaccaccggccttgcggaaattccaattctgtctctggtagcagccatagttcccctgattatcggtatgattttaggcaatctggatgaagatttcaaggtgcttctatccaacggattagctatgctgctcccctttaacggctttgtgctgggagccaatacaagcctgtttaccattgcaaaagccggcgctggcggtattgtccttggacttataactgttttatttacgggtatacttacgtattacctttacagcctgattcgaaggaaaccagatcctatgggaatggccattggcaccactggaggtaatgccgtggctgtacctgcatccgttgccatggcagatccttccctggaaccagtggtgggcgtggctactgcacaggtagctggtgctgttgttatcacagccattctgactcctatcctgactgggttctttgccaaaagggctgccaaaaagcagcagaaataataatggacttacccgcatatcaagaaagtgaggaattttatggaacgttatatcattaaggcaaataaaatcatagcaggcgatcagctggaagttaaggaaaacagcgggcttcttattgaaaatggcaaaatccaaaaaatttacgataatatctcccaagttgaaataccagagcaaataaatgtaattgactatggcgataaggtaataatccctggcatgattgactgtcacaaccatctggccttagacgccagacttgaaaatcacctggtcaaaatggaggactgcgaggcagagcagaccatacgcgccattaaaacgatgaaggacgacctggcagccggcgtaaccacctccagatgtctgggagacaggttttatattgatgtaacatgtaaaaaggcgcagaaagaaggaaggattgcaggaccgaagctggttgtcagcggcatcggcatgcgcagcagccatgggcatggatatgtaggaatgccccattgcggcgcggaagatttccgccggacttccagggaaaatattgcccgcggtgtcgattttctgaaggtatttatgacaaaggttatcaatgcaacacctttcatttatcactttttgaccttagaggagctgaaagtggtggtagaagaagcaaaaagcgttaatataaccacagcttgccattgttctggaggacagggattagacgactgcctgactgcaggcattgactgtctggaacatgtgtattatatcacccagccccaggtagaacgtgttaataaggaggaccgctgggtagtatatactcccagttacgccctgaatgaccagttgttatttaaattctccccccatgacagcgagggaagccttcgtgaaaaggaaattatctgtaaatgtttatccggcgccattaagggcggacttaagtttggcattggcactgatggtctgcatcaggggttggcccaggaggcctgctatatctctggtctgggtgctaaaaaccgggatgtactgtctggaatcacaatcaacgcagctcggatctgccgggtagacggaactaccggatctatcatggaaggaaaagcagctgatttggcaatcctggatggcaatccattagataatatcgaagctttaaaaaaggttacatctgtaattcaggacggaaccattattttctgaatctaagcagagcactactttgctgataaacttcagggccggcaccgggaaatacaatcgtgtatttaaccgtaccggccctgccgtctttatactttaattctccttataatccggccaaaaatgtctcagtttacacctataaaaaggatgctgctgcaaaccgaaattctatttgcagcagcatctcttattctatgtcacaacttcatgctctatcctgtttttcaatcaaagcttcaatccctcattatataatttatagggaaggcttcctgacaaatccaccacatcctttgttataggctgccctgcctttacatcttccagaagtgttgtaccatttaacagatagaacggagccacatttccagcatccttgagttcccacaattccggaaccagaccctcaatggaatgatgatgtccctggaccttaagtatggttcccttaggcatgtccttctgggccactccggccataacggaaacctggcggcattcagagtgagtacctagtcccaggatatctcctaacagaatggatataggcgtctcaagtcccatataatgataaggaagatagatacacgcatatttgccattacggcttaccacatgccctttacttgtaagcagttcccatacggtctcattctcgcatttgatgatgatgaactcaccccctgcaaaactggcctcatccggcgcacgcagattgcagaatacatctacaacaccagtcttcttaagtatgccgccatcttcctccggaataaagatatctgccagttcgctgatttttgcaataggataattcagacgtctgtcagacggcaccagcccagttacattggatacaaggttcatttcacaaagatcagcggaaataaccgccatatatttttctaacagcttacggcgtccctccaatgtctcgcggccttcataatgccagacttccttcagacccggaatattctcgtgcggtttttcagggccttccatataggtgaattcgtcagtatccggatcccatacaaagtcatactcgctggctttaccggctgctatgatctctaatcccaatacttttccccaagagtaaaggtccaaaagatttcttggctgatccccgttaaccagagagtatacggtaccgtgtttttcagcaatatgattcaacataggaccacacacactgtcagtctcctttgaaaccatatatacattgattcccttctttaatgcatccgctgatacctctgaactcacagccgtgtttcccgtgcactcaactaatgccgtaatatcactttccagtaccagccgatagtcgtttacaatgagaaccgcatggctgggagcactctcaacctgctctttattcccgcatataataatatcctctttcttgtatccaagacctgtgagcacctctacacattcgtctgtatgccgcgaagaaatcagcctcagttccattaactcaacctttggaatttgtgctaacagcgtatagccatatccgcgggttgcacctataattcctacttttgacttttttccgccgttgttcttaaataaacttgtgtaatccatatcgcgcatttcctttctgttttatatttttcttctcacccttcctgtaacagccatccctgtcccattctatgtaaataataagttcagtccatgatgctacagataatgttatgggtatatttgctactaccaaactataacagcaaatatcatgccaaaaattaatgaaggaaaaagtgacaacatttttgccaaaaagctaagaatattagggtactgtcaaaaaaatggaatatgaaaatagaatgattcaattatacctcgtaacatgtatgcaacaaaggcagtcaacaatgcaacaatgttgcaactgatgccaaatgacctttgtctcagccatcttttatgaaacaaggctacagggcgtttttcgatattataataacagaaagacaggagatttttcacacctcctgccttcttcatatctctcattacacctgtctattgattccgattcactcccccgtaaccggcaatcttattcctgccatgctgtttggcacaatacagcgccttgtcggcacaatacagaacgagacagcagatgcaactccgtacaaaacccagcaattgtaaatatccgccagggccagtaagacaggcttggccttaaagctgcatatacagaatattataccggctagaaaattaaacaaatccagcttccatggacttgctatgaaaagaatggacatcacaatcataaacgagtaaaaactgatggccggcatatccagactataggaaactccggaaataatacagaaaatataaattttcatcatacaaaggaagacggcagcctctatgcccctgctgctcttaaacagcaaccaccggtctgctgccatctccaacagcgtaaacacagccgtcccaacataaaccggctgcatgggagccacatatccggtaaagaaacccgaaacaaacacaaataccagaagcgacagcaccagcgcattaaaaatgtcaatatcccagtattataccgctcgatctctgatctgtatgtatcaaagtactctttattatatcctttcagaaaccattcccttataagacgaatcccgttcatacccataccccgcaccgcagcttttcatttgtctatcccaatcaaagccctcccagatgtcccgccaagtcgtatatcatctattatacaccccttgtatggtttggtgtaaataagctgccgcatttacagcttttactggctccgttttcctatatactgccggattccgacatatctcccatgctctgcgggaaagtgtttttcaccgcagggccgcccgtcagggtatatctcttccggtcatccttgagccggttctgcatcaatggttctacctcttctcaatcccatttgcctcaaatgcaatctgcagattggagcgcatcatgcggtccccctcatatcgcttccacatccactcatatgtatctgtcagctccgcacagggagtccgggacattgcctgcagtgcggcgtgggccagccagtaatcctccccctgcatccgttttgcaaaaaattccgcaaaatccagtttatccgggcattttcccatcacgtaaacagctgtacgcctgtcctcgctactgttttccatattttctgcaaatcccttcaaatccgcagccttcctgttactgcagtctcccagaaaaaataagatacgggccttgtcctttatatcagggcggtacagcagacccagcattttcccgtaaaaccggtccttatactggtccggcattctcctggcgcaggccacggctccctggggatggtttccaacgatagtttcttcaaacatcttcagccctttcattggcgccagtttaaaaagcagctctccctttgccccatctgtctcgggtctgtcccgctgtaacagaagctcaattgtttcaggctccgcctctgtaaacttatggaatccggccagaatcctaagcttgtcctctgtcagaacagctcccccatactccttcctgagttcctgctgggatttaaggctgatataaccataggatgtaaggttatgcccggccagaatttccaggaaatactgctcaaaccactccagaaatgtgagacccgttaaaaagggaccgtattccggctccatattccagtctatatatacaatttttcctctctcgctccccttccacatcagcagattatcgtaggtgcacccctgggtgcctatgaccaacaggccggagcagacctgcttcatccggacatcatattcattatcatcatttatatcctccatctcttccatggcccgcgcccagttaacaggactcatattccggtcaatgaacggaggcagggcttccttatccctggcatcatagaaccccagatattcgttgtaccggtccagattttccagggagtaaaggccataatacggtcctgcgccgccatttcccaccttggtgagaaaaaatacatattcatccggaagagtcaggtgccagcgcgcctcaaacctcctgacctcctcccgtgtcacggtgggattcagtttgtatccatgtttggacgaaccgaaaatttcacgcgtaccgtccttttttcctgcccgcttaactaaatcctttaggtatgcggcatgggcgtccgacaatggttcatatgtattagacggattgggcggattgggcggcctggattcctgctttcttctcaaatacgccgacaactttccccctatttttctgcctggcatacatctccccctgtctcatccctgctgctggcttgaacagcaagcaaatggtcgatattccggatgtcatgcttatccacttccctgagttcataccctgtatggaatactttctgaccctttgccgagatacacggtatggtcctgccctcaaaaaccacgcttccgaaataatccgcctcaaattcgtaccatccgccttccaggtctgcctgctttgcagttccatcatcattgattacaaatggatggatgtccacataactcagctccgggtggtaaagttcaatccgcaccgggcgccagtctgtcacgatttcataacctcgggaaaccaaggcgtcaagcaatacgtctgtgcaccgggcatcaaagttgatatctacgtccctgtgctccctggtctgcttcccgaccagcacgtccacaccccagccgccgtccagccagtactgtatgccggatgcctccatcaggtccaataccttcaataaatccgtctttgttactgtctcttttttgatcataataccctcgtctttctccataatcatcttatatagcgtttcctgccactgcatcaagtttaccatattctcccgctcatatctacccggttccgcggctgaagcaaagacccggaagcaaagacctgcagcaatgctctgaaacagaggactgatgcaaacccctgaaaaaagcaagccggaaggaccatcgggcctcccggcttattccagatatcctggcattttttccccagcaatgacatgtatctcaatattcccggacattttcttaaggctcatgtcctctcttaaagtttctcaatcagctgttcaagctgcggaaccggctgcatacattcatgccccacacagaggtaaaataattcaccggtatcaggcaccggataatcttttgtatagggtataagacgctccatttcccgtgcattttcctctgtttttaccaccacagtcagtccttctgcggttacggccagattcgcaagctgagcagcccgcttcctgcgcctttccgtgtcagagccagacgacagcgtacataccagctccttagcgggatacagcacatccatcatggtcagaagcccatagctgtgcccggaaggatatccgtccatagcgcctgccaggtaacagagctgtttttccagcaccttctgccatgtgacatcaccggtaatccgggtcagacggtacagtacctgagctgccacggaattcccagacggcatggcaccgtcataggtttcctttgtcctcacaataagctgttcgccgtccttggcatacagataaaatcccccgcgttcccggtcaaagaactgttccgtcattatctccgcccaggcagctgcccttttcaggtaatcaacccggaacgtcacccggtacagctccagcaacgcaagactataacaggcataatcatccagttttccctctcccgctgcatctccgtcacggtagcgcaccatcagacggccctccttgacaagatggctttttataaatgcatccgccctgacagccatatccacatactgctcttcccccagcactgctcctgccatcgcgcatgcacaaatcatccaactgttccaggaaaccagtatcttgtcgtccttgtgaagcctggcgcggtcaatccggtattgatacagtcttcggcactcctcattttctctgcctccaatggtgtcacaggagccatgacagatattgccgccatggtcaccattgccccacggttcctcacaaatctcctcgtaattatcattttccagcaggttgggtatgctcctgcctttaaaattaccatgccctgttattccatattgccggcaaaagtccctgcccgctttctctcccagtacctcccttatctcctcccgggtaaatacatagtattttccttccacaccatcgctgtccgcgtcctggccgcagtaaaagcctccctgggaatctgtaagctcccgcctgacatattccagaatcttttccgccacgcacccatacatcttccgcccggtgcttccataggctttgatgtaagccatgacaagcaggctgttgtcgtagagcattttctcaaagtgtggcaccagccactgcccgtccgtggaatatctggaaaatccgcctccaatgtggtcaaagataccgcccctgtacatctgcaccagggttttctccgccatggccaatgcctcaggccgcttctcccttgcgccatactccatcagaaatatcaggttgtggggcgcgggaaacttgggcgcacttccaaaaccgccgtttttactgtcaaaacaatccgccaactgcctgaatgcctggtgcaccgccccaagctccggctcggcctgcctttctgtccgttcatggctttttaggtatttctctatctgacctgcctggtccagaagtttttcttttttcaccttccactgtcctgctgccgctgtcagcagttcttccagacccggcctgccataacgggccctgggaggaaaataggtaccggaaaaaaagggcctgcagtccggcgtcattatgatagtcagcggccatccgccctgtccgttcatggcctggcacactgacatatatacagaatccacatccggccgttcctcccggtccaccttaacacagacatattccctgttcaggatttccgcaatcacctcattttcaaatgattcccgttccatcacatggcaccaatgacatgtacttcatccgggacaggtcagctgtacccaatagataagaaaacaggcttattttccagccttgctttctcaaatgcctcctctccccacggaaaccactgcaccggattgtacgcatgctgcagcagatagggcgatttctcattgattaacctattgggtctgttgttttgattgtccacgatatcaccccccttatgaacgaatatttgcccttctatgttccccaaggatacgcaaaagtatacccttctgccggcggtaataaatccgccggcagacagaaggcaaacattaacggtcatgcattctttcgggccgcagcgtctctgatgtttttaatgataaccagggccaccagcaggaatcccacctttccgttgaccgcatagatgaaattcacaatggctgcataaggcgctaccaatccgataacacagcccgcagccgccagaacaatggcagcaatcttgtaggtattagttccttccttagccacgcggtttaccggtgtccagagaagcggacaggctgtggtatagattcccgcaaaaatcaccacgctgaagacggttgcaaggaagggactgctctgatgcagaatcagcagaagcggaatctgggaagcgccaaccaaatctatattcttaatcaatgcgcttcctacaatcaaaactgccagggtcaggacaagaactcccatgatagtaccgtactgggcatccttgggattcctctcctccttgccaatggctgccaggaatggtgcaaaccacagcatgccaaatccaaggtaggaaatcatggaaccccaccatgttccggaagccgctataattccggagccgggaatcagcacctctgcttcctggaaactgaggttaccgttgataatgcctacaaggcctgcaagaaggcacagcacaataattgcaggaccgatttttcctatgatatcaaccagtttattgagtcccagcattaccgttagtcctgcaagagcagcaattattacagcgccaatagcaggctgaataccaaactgctgctgcagggtagctcctgcgccagcaatcatgacaaaataagatgcaaaggaaaagatgacggagaaccagtcaaaaaacagacctatgtattttccaccgaaatagttaaaaacctggcttcctttttcaaactggcctttgcggcccgcctccagaaaattatagttcatgtaaaggttgcctataaagaaaacgacagcgcaaagaactatttccgttccatatgccgcaaaaaactgcataatttcctgaccggtagagaaaccagaaccaatagcaaatgcgatgaatgcgccgccgatagtgacgactctgcctatattaagctttttattcatactttcctcactttcttatatgataattcgtccatataacacttcagatgctctgtggttctcagagcaatcgacatgtccaatatttgaaagtccttaagctccaaatccgtgtaaagggcatcggggcgataaggcgaatcatgaaactgagccagtttttccagaaccagcacatcctcccccatattgctgatggcctcgtcacacaagaataccgtatggcagggattatatcttttattgtagccgcctctgggatcagcagccaaatgccagcctttaataattaagtccctggcatagagcaggcttctttttgcattcccatccgtaaactctacacagaggccgagtttttccagtctctctccggcttccggattatttgtcactaccaatacgttcatactgccttttcctctcaaaagattgtctgttccgtaatttcagttgcaagcgcctccacggctgtatcaagcatatggcggcggaataacttctcatcctccttttccagttcaatatttcctgtcggatacggaattgccatggcaggcacaaccctgttggcgcctacattgatggaaataggtgttacagtacatacatgcactgccggaattccctgtgcttcggtttccctgacaatcgttgcgccgcaacgagtacaggttcctcaggcagaagtcagaataataccgtcaaccttcatcgccttaagctctgcagcaattgcctgtccaaaggcaactgcattgttggttgcgcagccatttcccgaagtaacaaagagagtatcgctgagcttaccgatttttccttctgcctccatatcctttaatacgtcggcaggaatcattcggttgggatcttcctgggcatatacaggatcgcagcctccatgtatcatctgatgcctgggcatatggaaaccgccgtaatccttactaaatgagtactttccaaacttagttgcaataccggtctcaatatggtccgggttcccctccggcacaacagcaccagttgttaccagggctatgacagccttggacagctccttaatggcaggcgccggaggcactctgttgtatgtaggcatcggcagttctgtttcgtagggccttccattgaccttattaagcatcatttcaacacacctttcggcgccggtcttattggaaaatttgttgattctctgtcccctttggatatagttgtcggccttggggtctaaggacctggggtccgtaaggactttcctaatcagggcagtcatatccgctatcgcagacctcatactcccggcagaatttctggtttttgtaataaaaccgtatgtacggaacatttctgcaccgggattttcggggtacattcccgaaaaagccggtatgcctttcagactgcagattttaagaatgttaccgcaggccattccgtagcgtcccgcattgaaggcaggtcctgcgattactatgtccggcttatatttctctagggcttttgctacgcctgccgtgacctcgtcaaggttctcattaaaataattatcaccgcatacaatggttgccacaatctcagcttcatcccccattgctgccttaagcgccacccccggaccaatcatggcgttctctcttaccgaaagaggtgtatcagccttctcttctccgccaatctgggcatagaactgatttatataatgaataatcttcattctcacctatcctccttacagaaccacagagtacatcctggtcatccccatctggttcattgaacacatgatggcgaccatgtttacatcaacactgccatctgcattgtaaccgtcaagagaaccgccggaaagtaccctaatctgttttgcatctcctataatcctatccatcttttccaggtgaacgggcatatagtccgcatctgtcccggtattgatacaggcatcagcctccggtgtgctgtctgtagtgccctcttccccgcagcatgcggaaagcatgcccacggttttgattcctgctttttccagactgcgtatcatcatcatcagatccgcgtccggatttcccgctccctcttccactaccgctgcaacatcccagccaagagacctggccattctgacagccgcgtgactgttgcgttccttatcatggagtaccgtatgggtgggtgttacaatacagccggcaaattccagatccacaccatggtgcttatacagctcctttaacaggggattattctggtggtcccatgtggtatttttatcactggcaatcacgcagcatccatttacgattgcaccgtcaaagatctcatttggattcatgtagacaggatttgtttttcccgcattaaccccgtatatgtagttatcatgaatcaggccctgggccatagccatatagatgaccccggcctttggcagtttcctggcagggtccacaggggtaagctgataagtctcatatgcgtcggcatcagcatccattgcagcctctgcaacataattggcagcatggagccccagcagcctgcaggcagcttcatgggcatggggttctgtgccatccgggcaatttccgacgactacaatgttgttcagcttagagtaataacaatagtctgcacaggttcccttcatatcaatcacaccctcctgcacaccaactatggttcctgtagtaacaatggcacagcctttaaataccttaagccgtccctctccgcagccttcataggcccctgcaaagcccgggaaggatgaacctgctcccttgccgtcgagctttacccttggctcaaccacatccttaactggtatgattctcacagattcacctggtcttgcgagatcaatgtcaatggagctgaagaaaggatccgcgattgcctcaaccatttcctgtttgttgataaacaggatgccggacctgacttctgtttttgcgccgaaccggatgtcctttatatggacgatttccatatccagacgcaggtttttatcagtactcatctgctaacctcctcctgtaaaatattaagaaaacgcgtttttcctaaatttgattatagagattcaagttgatgtaaagtcaaggtttacctgataattttcaaacaaaaaaagagcggaaaacgctctctttttaaatggtccatatatcaaatcattcatttattcaggcagctcaatagggaacatcacattggtgatataattctcagaaccgcatatattggcgcagcttatcatgtattcctctatgggattgcctgaaattttcaggccgtattccgcacaataatccatcagtttttcatactgctccaaaatattcctgtatgggcccacatgggacgtgtaaacacaccacatttcgggaaacagggtaatatccttcatgtcctcttccggctttaccacaggtaatatccactgggatttataaaaaggtttttttaaatgttccataccagggtcctcaaacctggacgttgcaggcccgcagattctcagatgcttttgctcacatatatcatagagaagcctgtgggtggtagaaaacttctcctgctcataaaaacacctgtaaaccggtatggtgacagcataggccgcggggtaatacttaatcttgataggaatgtggttttccctgcaaatctttgcgctctcaaagtaccctaaccccatatccacatttctcatcaattcttccagatatgcctttttgaaaagcagatggtccagctcatcgttaagcagaaccatcctattaatcagtgcctcacgctgaaatgtgagactgcttttttcacatagtgccttaatgtctgctacggtgagacccaggcgtctcatctcggatataaacatacatttcatgacctgctcttccgtataatagcggtatcccgtttcatcatcccttatttgaggcttcaaaacaccctgttcatcataaaagcggagggctgttgccggaattcctacaatatcggcaagcttaccaattgaatacagattatttccctgctcatctctcatagaacccccctgttctaaaaccttccacttggtgtaatgttattttacactatatatagataccttttcccgcagcctcataatattctgtccctgtcaacccattatttccagtatatcacgaaccgtaaaatcttctacctgcttttgcgcagtataggaatacaaaaggctgccacgaaaaataactgtctgagtcatttcgtgtgcagcctatgtctgtgatatgaaactatattatggcagaagtacgattctatttatagaatgtttcgccagcgtaacactgccggactgtgtctgcatcatgcaggcagccggtacaatggattcatccggcaatgtgttcatatcggaagttttctccgaagtaatggtggtgatttctgcttttttcacggttttatttggagtttcatatttaatttcaagaaccgcttcctggtcacaggaacggttcagcgcaaaaataaccgtatttccattttcgtcaaggcaggccgccgcgtccacgtaggggacaccggaaagcggttctatatttccaatctgctcagacgtactgtaggttggcgagaaaacatctatgtctaaaacctcttttaaacggcttccggaatacatggacataacatggtacgttgcagtcccaaatgcatgaccgtccttgcttacaatgcatcctccgggccatccattcaccaaatctgacaaattacacatggcaagcttatctgtattccttaaaaacatattgagcatgccggcattgaaaatagcggcctctaatgtctgttcccggtaagagtcaataatggttcccacattatactctgttaccgctgccatggcagccggattgccgcttttgcgtatggtctcgcaggagtcgtttaaaatcccttcgtactttttcacggaaccagctgttgcgtagtagatgtccctgctgtcatgctcgccctgtatctctttctgtgaatacatatggagacataccacatccattttgtctccgatgatttctgaaatcttccggttccattcctgggaaatgctgtctccgtccccgccgcataccatgaaagtgatggtcggatccttctccttcatggcttcataaaaggatagatacttgaccgcatatccggaggcatccagatggcctatttcccaatcaccaaaggtttcatttccgatatcccagtatttgatattccagggttcgggatgaccgtgggcagcccttaaccggccgtaaggcgtgtcggccaagccgttgcagtattccacccaatttgcggcttcctccgctgtcccgcttccaaagttgacgcagatcataggttcacagccgattttacggcagaactccatatattcgtccataccaaaactgttatcctcgtaaccgccccaatgctcatttttacggaccggacgggtgtcccgctcaccgataccgtcctcccagtgatagcagtcggcaaaacagccgccgggaaaacgtatcacagcaggggaaatgttttttatccgttcaaatacttctctccatattccgtctaccgtatcagaaggcatgagagaacagccatccacccataatgtacccgctgcttttaatcggatttccattgttcctgtgtaagtaactgcagcggatcgaaaatcaaaacagtattttttccattccccgtttacagaaatggttttgcttaaaaattcccgtccttctttatcgtaaatttcaatggaaacaggaacctcctgctcagacttcatccagacatatccttcataccttccattctggatacataaaccggtctgcgcggttccggcatacccgtcataatggtttcggtctgttatcttaagagaacagccttccctggaaatagtgtggtcccagtcctgttcaaagtgaaaggcatcttttacacctgtccggtgccagaaatcaggaactccgtcttttacgtgctccgatatttcaaaactcctgttttttaacagctgcgcccacatgccttcgtcgatacagtctctcatatattctatgaagtgtccgaaaatcagagggtttacaggccgtttatttccttctttgatagtaatttccgctttcatttgttttatcctttcatacctgtcattgcgattccctgtacaaactgcttctgcgcaataaagtaagcgattaagattggcagaagggacaggcacgcgcccgccataataataccgtattcgaccacatgggttcccatgaaggtggcaagaccagagggaagggttttcatattatcatccgttgtcaggagcagcggatacaataagtcgttccactgatacataaaatgaaatatgaacagggatacaatggccggtttgcacagcggaaccatgattttcctaaaaatcccgaattccgtgcagccgtcaatccgtccggcttcttccagccctttgggaagggagataaagaaggatcgcatcatgaaaataccaaaggcattggttgcccgcggaaggaccagtcccggatacgtattgataaggccaaatttaaaaatttcaatgtagagcggaaccatgattacctggaagggaatcatcatggttcccataaccataagaaacataatgttttttccggggaaattcattctggcaaaggcataacctgccatggtgtcaaacaccagcgatgtaacggtcactgctgtggagaaaataatggtattgcggtagtattttaaaaatggaacccgcttccagatattgatataggaatccagactgaaccttcccgaaaacagctttggcggataggatacaatctcggcttccggtttaaatgatgtgaccagcatccagataaacgggtacagaacaataaaggccagggctgcaagcaggatggttataatgatcttcccggcatttttccggtaaatgttatttgtccgcgtcatgtgtattcctcccgtcagcccaaatcttcttcaccttttgtcatatgtttaaaggtgaatactgaaataataaaggtgatgataaacagcgcaaccgcaatggtggacgcgtagcccatgttgaacgaatcaaaagccatgctgtatataagctgcaccagtgtctgtgtcttaaataaaggtccgcccttcgtcatgatgtatacctggtcgaatacctggaaggagcctatgatgcagttcacaaccgtaaaacttaacgtcggcatcagcatggggatggtgattcccctgaatttctggaatccggtggcgccgtcaatattggcggcctcataataggactcatcaattccatttaatcctgccagaaggatgaccatattaaaaccaaaatttttccatacgctgacaagaataaccgtaggcatggcccatgtgggactgctcaaaacattgattgggttgaaaccaaggagttttgcccagtagcagaacattccgatgtccggattaaccagaaaactccataggatggaaacaatggtcatggaacagatggcgggaataaaataaacagacttaaaaaatccgctcagccatccctttctttttaccgcaaccgccgtcacaagagccagcccgatttgcacgggaaccgtgaaggcggtgtaataaaccgtattaaaaagggcattccaaaactttttatcacccgccagctttgcgtaattacccagcttttgaaactggaaattctggaacatcatgtcgaatttgaaaaagctgaatataaaagcgataatcagcggaataaatacgaatacggtaaaaatggtcatggaggggagaacgaaataaaggccggctctttccctctttctttccagtgaagttttcatcatttacattctcctctacagggtcctattccagcatgctctgaatgatgtcatttgcttcatccagggattcttttacatctgcgttctgcagaagaattttttcaaatgcaggagtaatagcctgattctcaatatctgcaaagttagttaactgctgcaaatacatctggctctcatttgccggttttgcaaattctttgatatatggattttcgtttaaacgcgcatcgtccgcgatatcagttcttgcaggcggaaatcctgttcccaggcaccactcaacctgtgtgtcaacagaattccagtatttgaaaaagtcgtaaaccgcctctttattcttactggatgcagttaaaaacatgccaacaccgtttgcctgtgtaacctgctgctctggtccctttggcgcctgcgcaacaccaaaatcaatgcctgcgttcttaaatccggtggttgcccatggcccgcagaagtacatggccagcttctggctttcaaacagcttgtcaatttcacctccggttaaaacctccggaccaaatttcttgtcacggatattttccgcccacctggtgatggtttccacattttcaggactgttgaaaacagcttttccatcttttatgaaatctccgccatttccccacagcatgatacaccacattggggttgtctccttaaccgccatgtcaaaaccgtattttcctgttttctccacaatctgctctgcatactgctccagttcatcccaggttgcaggaggcgtttccgggtctaatccggcttctgtaaagattgttttattgtaatataaaagaagggttgcaaagttcatgggtacgccgtaataggtccccttccactttaaattgtccttcagcgcatcgggcaccactgattcatcaatgattccatctgcataagcatcgtcaacaggcgccagggcacccggttccgcatacgtgccaaggcgctccggagcaaatgccaggatatcaggcccctcgcctacaggaagtaccgtggcgagcttctggtaaaggctgtcccagggcattatattcatctgtacttcaatgtttttatcattggtatcattgtacttttgaacaagtgcttccagggtgtccttatcagaacccgtaaaaccgttccaaaaggtaattactgtttttccgccctcagatccctctgtctgggctgcttcactttttgtttctgccgctccattggaaccggagcatccggttaaggcagctgatgccgccatgattcctgccagtccaagtgctaataatctctttctcattttcttcctccttgtataatggttcttattttttcggcatccactttgtcccgtctgttcatatccatgtgtccgttttgttcctgttctacgtcggtcagctgtgtgtaacaatatccgctgataaaatccatactatatatcgcgtctgtcaggctattcagccgttccagataactgccttctgatgtttctgcgttcccatatccccacgccttttcatccttacagaaagcgattccgccaaattcacttaaaataataggctgtccctcataacgaaagccgccggcaaaggcatagcgctccccgttaaaggattgggtattggacaggttttgttcccaatccgtccagtggctaagaagatcctccccatattccgcataatcatgaagtgttatgatatcggatttcgtgtgctcccatccgtcgttgctgatgacaggccgggtggcgtccagggatttcgtcagatagtaaatggcttccgtaaaaacctgctgttttttatcacataggattcttggaatcccccaggattcattaaatggaacccaggtaatgatggacggatggttataatgctgttttacaatgtcaacccactcttttgtcacacattcaatggccctgcggtcaaattcatagaacgaaggcgcctcgcaccagacagtaagaccatagacatcagcccagtagtagaagcgttcatcttcaatcttttggtgtttcctcactccgttatatccatattccagtatttttttaatatccagaatcagcgcctcttcatccggcggggtcagcagggacgattcccagtagccctggtccagcaccatctttaaataaaagtccatgttattaagttttactctgccggaatcagtggatattttccgtaaaccgaaataggaaccaacctcatcaattaccttcccatttttataaattctgatgcatacatcatagaggttaggtgatttaggacaccagtatcttactttccacttgatttcatcattaacaagagagatttttttggaaaacgcattttttatgactttatcttttccggaataaatggtaaaattctcaaatgtaataatggtttcaatttcaaatgaatcagagctgtccttccataaattcagttcataatcaacttccagggaattttcgtcatagagaggtgttaaataaagggctgttaaataactgctgtcagtttcttctgcccatacatccttccagattcccgttgtctgggtataccagcagtcataattttgtttaagccaccgctgttttcctctgggctgtacggttgaataggtatcttcaatgcggcagaccagctgattccccgtttttttaagtgcttcggtaatatcaaaggtgaatctggtatatccgccttcgtgaactcccatataaattccattgacccagagctccgtccggtaatccgatccttcaaagtttaaaaggattcttttcccttcgtgaagttcaaatgactggcttctggaataccagacaacattgcattcatcctgtaccccaattccgcccgccggactttcatacgaaaacgggacgataattttacggtcttcaaatccattctgccatccgcatttgattccctcctttcggggatcgaatctgaagttccattctccattcagggagaaaaatgattccctcacgaactgtggtctgggatatccttttttataaaattttgtcatggcaccctcacatctttacttgcagttttaatgtacctttaaaatagcacttattgtacaaaatgtcaatatattatgggtataataataaaatatttgtgcatatttccaaaattaatgttttggtgtggtttgattaatacagtattactgtaacaaatggtagaattaacattctatctccttgttttttacttttacacccgatataataatacaataaagcattctgaatgggtatggctgaaaaaggtttgctatgcaggaagttgtatgtgtgtaaaagtcagctatgtgtaaaaattggctatgcataaaagtcagctgcggggggtatctatgaatcggcaatcagcaaatgaaaaagaaaagatagaccggcatattgtacttgacattgattcggaagagaattatgaattatttgaacggcttgggaaggcactttcatccagagtcagaatccggatgctggcgctgttaaaacataagtccatgaatatcgtggaactggcgcaggagcttacgattcctgtttcatcggctgcatttcatgtgaatatgctggaagaagccaatctgattaatacagagatgcttccgggcgtccggggttcccaaaaagtatgcagttccagggcagaggatgtgtttctgtctatcaacacttccccccaggaaaaggagcggcggtcattcagcgtggatatgcccattgggaattattacgatttcaggattcatccgacctgcggaatggtaaacgaggaaacctacattgattcctgcgatgatataaaatctttttactcacccggcagaagcgcggcacagttaatctggttccagaggggttttgtggaataccgcttcccgaaccatttcatcagcggcaaaaatccaaattatgtatcattcagcctggaaatctgctccgaggcacctggataccggaatgtgtggccctccgacattacattttccatcaatgacagagaacttcttacctatacctctcctggtgattttggaggaaggcacggaaaactgacaccgatctggtggacagacggaaacacacaattcggtcttttaaaaacaatcagcgtggatgggagcggaacttatttagacggggtgatgaaatcagaagaaatcaacattgatacccttgcgctttcagcccagccctatatctcttttaagatagaaattaaaaaggacgcaaaacatgtgggcggaatcaacattttcggaaaatcatatggagattatccacaaaatatagtgatgcatgtggagtattgaccggcgggggccggttagcagaataaaaaggcggggtgaaatcagacgtatattaaaaaacgggccggcggtgaatagccggaatcggcaaggccggcagaagaaggccggattcggccttcctgacaaatgttccggtacccatacctatctgcttatactacggatatcataaacaaactccttacggaaatagaacgcatggttcttatttgaaacataacggccatatacttcggaataaatagggtgatacggcattgaatccttgctccgcacctgtatatgctgtccgttggatgtatgtatacgcctatccgggcttgtctctatgtgcatcctcagctgcctgcaaatggagtagtaatctgaacgccaaatatcccgaagctgcgcataccggggcgaactgagatcgatatggatgctgggcaaaaacatccagtctttgggatcgccgtctttacagaccggcacatataaaatattgctgattttttcgtacaaatgcgtttcctcaaaggggcgctcctgaataagttcatcgatcacactgctaatctgtgtaataaaaaccgtttcctttggattacccgcattatcacacttgttagttttcaattccccatcatcaaaatccagatttgtgctggacaaatgcattcccagggccagctccaaaagctggcctgttttccctttattaatgataatcatgttcatatcgttctggctgaacaattcctcaaatctgatacctgctaatttattaaaccggacacacgcttcttgaagtctcattttttctccttatttatggctggcatactgattcccaatctgtttctcccgcgaacgttgcccctgcgaacaccttcatagcctcctcttcctcaaactgcctggaatacagttcataataatatcccttttgctccagcagttccgaatgactgccccgctctatgattttcccgtcctttacaaccaatatcaaatcagcctgacggattgtggataaacggtgtgcaatcacaaaggaagtatgtcccttcagcagatggtttgtggcatcctgaatcagtttttccgtctgggtatcaatggaggaggtggcctcgtccagaacgaaaatggcaggattggccagaaccgcccgcgcaaatgaaatcagctgcttctcgcctgtggacaacaggcctccgctttcacccacatcgctgtcatatcccttttccattttcgccacaaccatgtccgcagacacattcctggccgcctcctcaatctcctcatccaatgcatccaggcggccataccttatattttcccgcacagttcccgaaaacagatgcggattttgcagcacataaccaatctggctgtgaagccacagctgcgaccgttcccggtaatccacgccgtcaatcaatatccttccctttgtaggttcaaagaaacgccccaccaggttcacaagggtagactttcccgcccctgtctcacccacaatggcaacattcatgccggcaggcacatgaaggttaaaatgttccagcacatattccttcccgtccgggtacataaaagaaacatcctcaaacacaatgtctccctggattttttcccaattccccttattgggcgaaaaggcgtctccgtacttcctgagcacatcggttctgtccaccacattgggcttttgttccagcagatccatcacccgctcaatatttgcctgacaggaaatcaactccgccagcagcctggcaagctgctgtatgggttcaaatataacaaccgcatacgagataaatacagacagcgtccccagtttaatgatattttcctggaccatatagccgccctttgccaacaccacagctgaggccacagaactgaaaaacaaaatagccggaatatagaccgcattcagcttagccgaacggatcgccgcctgatgcatatccgatgtcttttcaaagaagcgtttttcattgtccgattcaatgaccatactctttgacgtcttaaccccggtaatgccttcattgtaggcgctggtaatctgggaattgatccgcctcaccttccggttccatttcagaatccgattctggaaatacacggtcaaaagggcaatacacggaacaatcatggtgatgataaatgccagctgcgcgttcagcataaacataatcacaaacacactgaccacataaatcagggcccagaacatatccaccaggccccaggctatcatccccgcaatcctcaaagtatcactcatcacccgggcgtggatatatcccaccggagtcgtattatagtaggaaaacgacaaggtctgcaaatgtttaaactgcgctctctttaaatcctttcccacattcatctctatggatgtagccgcgtgaaccgacacatacacgcagacagtctgggccacaataacagaaatataaaccagggtaaatactccaagcccatccaaacggtccgggataatgaatgtgtcaatggcatagctctggaacagaggcacaaggatatccactcccgcaagcagaatattaagacccagcgtaattgcgaaaaacttcttatacggcttgaaaaacggaaacagcttcatccatatgcggaagctgaagggattgttatactcctgttcttcatatgctgccattgattatccccccatccatcttatcctctttcttcttatcctctttactcttcttatcctttttattctttttatccttttcatcctgtcccatcaggtctctgtcatcacggctcatctgtatttcataaatcctgcgatagattccatttctccgtatcagttccccgtgggttccgcgttcttctatttttccctgattcagtaccaggatttcatccgcgcccataagagatgtcactctgtgggatatcagaataaccgtagcctccctcatatgttccttcagcgcgcagcggatgcggtaatctgtctgggaatccactgctgataaggaatcgtcaaacaccataatgggagctttccgaagcagcattctggcaatagcaatcctctgcttctgccctcccgacaaagtaactccccgttcccctacaagagtgtcatatccatccggaaaactcataatggcgtcgtcaatacacgcaatctgagccgcgtaccgaatctcctccagagacgcgcctggtacggaagccgctatattttcccggattgtcctggaatacaaaaagggttcctgcaataccattcctatatttctcctgagctcctcaatggggatgtccttaacagctctgccgccaatacagatgcttcccctgttttcctccagctcatagagccgtgaaagaagctggattaccgtagacttcccgctgcccgttccgcccagaatcccaaaggtgctgccttccggaactgtaaatgaaatatcccggagcacatcctttccttcctcatatccgaaggatacatgctggaaggagatgtcatactttccgctggaatgttcgcgttccttccctcctttttcatctgtctttccataggcttcttcctgggagcgtatgatataatccacacgttcaaacgaaacgccagccttgctcatatcagaaagaatacgcccaagaccgcggattggccacaccagcgttgaattgtaagccgcaaacgccacaaattcaccaaccgatatggaaccattcacagcttccaccactccgaaaataataaccgcaatcacctgcagccccgttatcagatccccaatcccccaatacagtcctgataacgtccccagacgaatccacagcttggcaaaggcattattcttcttgtcaaaccgctccatctcaaattgttcccgtccgaatgcccgcaccacgcgcactcctgttgcattctcctgcacgaccgtggaaagttctccctctgcctcgtccgcagtggtaaaccgcttggctatcagccggtaaaacacagtggagtacaccacaacaaccggcacgaacaggagaacgatgcaggaaagcttcacattcatggaaaacatcatgacaaaagacgtaagcacaagaaaggccgtgcggaacacctccagaagctgggtaaccacaaatccgcgtatcacctccacatcagaagtacaccgctggataatatcccctgtctggttcctgtcatgccatcttatgggaagcttctgcacatggataaataatgtatcccgcaaatttttagcaaaattctcccctgccctggctgtattggtacggctgatgtaggtaaaaataccggaggcgattgccaccgccacaatcatcagcgccagaacccagaggtggctggataggtaacttccgctggttccgctgctgctgatggttccgctgcttccactgagcacctcatcaatgctgaagcgaaaaatctgcggtgtcagggcatttaatatggttgataccagggatgcggctacggccgcggcaaaatagagtttggagccctggaggaatctgaatatcagatggagttttctgtgtttggggattgtgtttttttgtatgtttttcatatatttacccttttatattgcttatgattaaatgcttgatgctatccggttgataaatactgtctatgtaaatgatgtaccagtaaatccggggcctaaattgataaaaaccaagcatcatcaattacatagtcattgaccggggcaactcctaactgtaattctctcaacttttctaccaattcatccccatcaactaaatcaatcggagtagctccaggtctattggcctcttcaattgcaggcgcagaaaacttaccggttgtaataaacaggcctttatcagcccttccctgcatagctcctctaaaatcccgaatttcaccagcagacacacttcctgtatatcttttacactgaaaaagcatatggaagctaattattccattcaattttattattcccattccatcaattccaccatccccagtctttcccgtaacttttacttgtgtaaatccagactctcttaataatcgttgtgttaaacgttcaaatgcatccggttttaaattttttaatacatttttgagtttttcgcgccatgtctggatttcatctggtgtatcaacgccgtcattttctaaattatgatcctcaagacttatctctttcgtatctttcatctttaataaggtcatttcacgaacctttttaacaatttcatccgaatttatttcctgtaattcacggcctaccgtagttagcgcccatactccacgtgcagaattctctaaaattccaacctttttcatatatgttcttgtccacgccaacctatattcgacttctgatttactggtatcaccatgcataattgttaatacttctggagataaacctaatatttcaatcgttttatcatcaatctcttgtatcgttcccgacccacctaattcttttatggcctgaaacaattcctgcatcatttcatgatatgccggtacttccactgtttttctcatatagctcatcccctctttcttacgtaatatctcaaaacccttcttacataattaaccaacccttttctactaggcagatataatccatatttagatactaacgaaattcctttttgcgaatcgctcgaaatgattgttttcctaaaaattataacatgatttttcagaactggcgactctcgttttattcgaggattaatttcgagacgcgtcctttctttgttttctacttccaacaataacattttcgatatcataagcatcaaaaactttattctatacagtagccatggctctcatcatgctcctgttcctctatctcttgccgactgccatcggatttctctagcggcaattcagcaaaaaacggggatatgccacctcatttttcaatctcttttcttcataaaaaccgccgctcttcacaagcgacggctaccgtattaataaatagtgtttataaatattcttttagtgtaaatatagtcatctcatctttttgaattggagttgactatagaccatgttctgccaaataattcgtataccctttcattgaaaatcatttctccagaataatagttatcaactaatgtccctatcattcttcacgaacttcatcacttccaaagcttatacccgtattagaaccatttttttgaataactatatctctacttattttacactgtacttccatttgtcttttctgacacaattctatacaaacctcgtattgtagtactcgggcaataataatgacaaaaaacatagctttccttagtggaactattcgtcagtctcctactaattattttctccgtccatcttatctaattccccaatactctctaaaaaatgacattccacaggagacaatatatattcctgatttcttttatacctttcatactccgaatgcgccttctctaaggcctgctgatgcgttactttcccctttgttgttaatatatcacgtctggtcatcctgagataatcatcaatcgtctccagccagtctttcatatacattggttcctgatttaaagcatgtacctctgcaatatccaaatatgccgttacaattttattgagtgcatccaactctttttcatcaagataatttttcgccacttctacatccgagagttttatacgtttgccactccatgtagtcagtcccatattatctttatctgcatctgccctttggtaaatcacctctgccgctgtatgcttatgtgctgcccaatgcatcttgttttgaacctgtttaaaaaactgtacggaactctccgccttcggattgtagtcaatactggtcgcataaatttccagcacttttctccaaaacactttttctgaagaccttatatcccggatacgcgccagcaactcatcaaaataatttcctccaccaagattctttaatcgttcatcatccagcgcaaatcctttaatcatatattctttcaagatatttgtagcccaaattctgaattgtgttcctcgcaaagatttcacgcgatagccaacagagataataacgtcaagattataaaaatccacatgatatctttttccgtcggaaccagttgttgcaaaatttgcaacaactgaatttcggcttaactcgccttctaaaaaaatatttttaatatgtctggatatcgtggatttatttctttgaaatagatctgctatctgatctaacgataaccaaacagtatcgttatcaaacgtaacttcaactttggtaactccatcctctgttgtgtacatcaatatattagatttttccactttctcttcccccgccaaaagatctccgaaaaaaattcgatgattatactattccttaagtttccatatccatttcactatattttaccatactcccctcaccattaccatctgaaagattccttcatttccgtttattttcccctctgcaacataacatcctcgtttacctattattcaaactcacatatctgatatccctctttttcagcataacaaattatcaaccgcttctcataaacatctattctcttcactctatcctttacgacattttcatcatattccccattacatacaacttttcccaacatctctcttacatcttgatcgttcaaggtaggtgaattttcacactctgcctttcctttttccatccttgtcccacatctccacacaatcttcccacgctccgttctacgcctgaatcctccgccacaatacccacataccaataaattactaagcaagtatttgctgctatatcggttaccactgctaatctgattgccgttagctgttctaatcagcctggctctattaagcatttcctcctgcaccttatcaaatatctccggagaaataatagccggatgacttcctttcacataatatctggtacgctgtccaatatttttctttcgtataccattcagataatcctccgtaaatgttttctgaagcatcatgtctcccttatatttctcattctttagcatctgctggattacatttgcactccataccgttttgcctgttaccgtttttacaccactttcctccaagtgtgtttttatctgcgaaaacgtgtaaccctttaaatataactcaaaaatcaaccgcactatttcggcctgctccagaacgattaccaattccccttccacacaccgataccccataaaatgtttgtagctgctaaatagcccttcctcaaattttcttttaatcccccactgaatattctcactcaagtttctgctttcttcttgccccattgctcctgacaaggttattgccgcttctgcatccggatcaaacgaattcacattttcaatttcaaaatacatttgtatactcctttctttcaaatatctcataatctgcaatagctctactgtattcctggatactcgttttgctgatttagtgattatgtaatcgaatttcccctctgcagcgctttctaacatatgtttcaatccgttacagccttttttccttaatccacttcttccgcaatcccagaatactcctgaaaatacccaacctggatgatctgatatctgttctgtatatgtcgtaatttgatgagccaaactggctaactgtgtctctttcttagtgctgacgcggcaatatgccgccacacgcagcggttccatattctcttttttcacaggtatataatatatatttttcaaaacacatcacctcgtttcatcaataaggaaaaggcgcgaaagccaaaagccttcacgcctcaccacacggcaactatccaatctcacctaatcatcatttaacactcttttgcaacaggacaatactttccgtatgcaccgtccccggaaacatatccaccaaccaagcctccgccgcccgataccccattttcttcatataccttacatccctggccagcgtctccggattacacgacacatacaccaccttctcggctcccagcttccctacggcgtccataaactcctccgtacttccgcttctgggagggtccatgataaccacatccgctttctcaccctgttcagccatattcaccagaaaacgtcctgcatcattgcaataaaagcggatattctcaattccgttcatcttcgcattattaacagcatccctgactgcatcctgattcagttccacgccaataatcttcccggccgccttacttgctataatcccaatggttccgataccgcaatacgcatccaccaccagttcctgcccggtaagaccggccagtgacaatgccttttcataaagaatttccgtctgcaccggattcacctgataaaatgactttgatgatatacggaaccggcatccgcacagctcgtccacaatatatcccttgccatacagtacatgctccttatcccccagaaccatgcttgttcctcttccgttaatattctggaggatggtggtaatttccggatgtttctcccgcaaagccttaacaaagttattcttagacggaaacaccggagatgctgtaaccagaactaccataatttcccctgtggaaaaccccttgcggattaaaacatgtctgagaagcccaaagcccgtatcctcatcataggtccggattttaaaagatttgagcattccgcgtatagtaccgatgatttcatctgctttctggtcctctataaggcacttctccacaggaattacatggtgtgtattttcttcatatattccggaaatgatatttcctcttttgtccctgtcaaatacagcatgtaccttattgcggtaatgaaagggatccttcatgcctataataggctttacaggacagagtccttttagcagttcttccgcctgcttctgtttgaacgcaagctgcttggcatactccatatccagcagctggcagcctccgcacagattcagcaccggacagatactgttgctccgtctgcttccccgtcccccatatgagcctcctcttttggaatcctctctccgcttttcagcattaagagcccctccattttgttttttagagactgacaatccttccacccctttgcgtacccttggtgagctgccatccctgcgtttttctccactgcgctgcctggaaaatgcgccctcatacccatcaaaccgtttcccgctctcgcctgcaccatttttaccttctccgtccctcaccttgtgtttactgtcttttatgttgtcttttatattgtctttcattctgtccttcacgttgtctctcaccctgtctttcactccgtccttcacgttgtctctcaccctgtctctcactccgcccttatctctctttacgcctttcctgcttcctgtacccgaatctgtccccactcttttaaccgtctttccagccattttaccggacattcctctatccgctcttttatccatctttctatctcctcgtattcatccataattttatgcgcctacagcaaattccaagttactgtcagcttcattcaaacatgcttaaccttctctaaatcaaaatccatatggccattctaccatatatttcccctaatgtataaccatataaaccgaataaattacatccaaaaaatcacatctccctgctgtcaataacaggataacataaatttttgccatacctgttatgaatgccctgtccccacatccccagccgccccgccacaaatccacaccctttcccgaaaaaaagaccggatatttcccgcagcactgctctgcattctgcaatgccgcgggattacccagcctttttcatccatttactatctttatctgtccagccttttttccaatccggccatcatcaaccgctcctgctttatctcaaggcttctccccgcttctcaatcctcctcatctctcaaactgctctcgtagcctccgccagccacactcgctcatcctcatccagatagggactaatcttctcatacacctgctcatggtaccggttcagcagctccacatcccgctcagacataatctccctgtcaattacctccaagtcaatgggaacgtacgtcagatactcaaaccgcaggaactggccgtattcattcttctcatcctcaacacacaaaaccagattctcggtcctgattccatggcttccctcaatatacacaccaggttcatccgatgtaatcatacccgcttccatcaccgcattgtcctggcgctccggaaccattttgaagcggattccattgggacgttcatgtacgctggacaggtagctcaccccgtgtccggtaccgtgttcatagttaagcccccgtctccacagcggctctctggccgcataatcaaggctgagtccgcggcagccatgaaggaacttcacatctcccagacgcagcatactcataagcaccaaggtaaaatgctccttttcctcatcagtcacaggccccatggcaatggttctggtaatgtcggtggtcccttcataatactggccgccggaatcaatgaggtacagtcccctgggctccagggggatgctgctctccggtgtggcggagtaatggcacatggctccatgtgctccatatgcggatatggttgcaaagctcaggccaatgcatccctcctggtccatgcgcagcttcccaagataatccgacacgctgatttcgtccatgggaatacgccccgtattcttcttcagccagtaaataaacttggtcattgccacgccgtccttgatgtgggcccgcttttcattctctatctccacatcatttttaaccgccttcatggaagcagtgggattcatcctgtcgatcaccttattggacccgtcaatcaggcggtatacagcatagttgatacggcatttctccagcaggactttctcgtttttaagcccctccaccatgtcgtataccccgtcataaggcatcactgtgacgcctgtccgttccagatactccctcacgcttatgccctttgcatcctccagatacggataagcttttccttccagcacactgctgttgacaaacagatacagttggtccatggttaccagagcgtacgacagcaccacgggattatacagaatgtcattgcctctgatatttaacagccacgctatatcatccagggaggtaagcacgtgaacagatgcatgtaccttttccatagcctccctcacatccgctatcttatccaatgcgctctttcccgcatacctctcatccagaacccatgcaggttccgccgacagctcaggccgttcctgccatatcatgcctgccaggtcttccccgtaggaaatacgcgctccccgctccctaagcatttcctccaaagcaagcccttcagctgcattgactacccggccgtcaaaacccaggcatccgccctcaggcatcttatcttccagatatgctctcagtgaggggacgccctcctgccccattttcatcatggtcactgtggaatcctttaactgggccgctgcctgtacatagtaacgcccgtctacccaaaggcatgcttcgtccattgtaatcagagccgtaccggccgagccggtaaatccggtcatatattccctgcatttgaaatgctctcccacatattcggattcgtggaaatctgccgtgggtatcatatacgcatccatgccccgctccttcatcaatttccgcaatgcatccaacctgtcacgaatcacattcataacatttccatccttccgtttcattctatcctttccttctaacccttttccttctaaccccttttcttctaatccctattccactacctctattccacgccccctgtctcaccaatccctatcccaccaatccttctatctcaaatccccaacttatcatccgtctccctgcacttatttcttcctcatggcatcctctatggccgccccaataccttcattgtacgtaggctgtgcccgcatggcaaaagacatttcctctgcgctcagtccgttggctatggccgtggctatttccccaatcatatcagtagccctggggcacatcatctgtgctcccacgatggtatttgaatatgcctcaaataccagacggataaatccattttcccctccggttatgatggattttccattttccctcatggaaaaatgaccgcagcgcaccttcagccccttttccctggcaatttcctccgtgatgccgacagtggcaatctccgggtccgtatagatacagtttggcacaatcggaagggacacatacataccgttaggcactacctccagcttaatgctgtggggccttccggctatcttttccaccacatatgtaccctgagccgctgccacgtgggccagctgtgtcctggcggacacatccccgatggcgtagattccccgctcgcttgtctcaaaatcgctgtttacggcaatcttcccgccttccatctccagagaaatatccttgcctaaaagcttctccacattgggccggcgtccgatggccatgagtatctggcctgccctcattttgatgggttctccctccccgttgggagtgatgacgcagcttagcccgccctcatcctccaatatctcagtaaccgtggcatcgcagtacacgtcaatacccttttggcgcagctctttttccagctccgcggacatcacatcatccataggcgccatcagatgcttctgcttctccacaattgtcacatgggaacacaggttgttgaacatagtggcaaactccaccgcgataacgcctccgcccatgattgtcagcctgtcaaaattccagctctcagctgccagcagcctgtcgctgttccatacgcctgtaaggtccgcgccgggaatccggctcatgtagggcactgcgcctgtagctataatgacagcatttccgcggaagaattcgcggccgccttcctttagctccacctccacggtcctgtccctgcgaagcaccgctgttccgtaaacaatttccacattcagcttctcaaagccgtacttaatgccgtccctgtatttgaccaccgcacttttcttatacttctgcattttcccaaaatcaaaggaaataaaatccgtggacacgccaaattcatcgcagctctgcatcatatgaaacatatcagaggcgtgaagcagcgccttggttggaatgcatcctctgtttacgcatgtgcctccaatcttctttgcctctatcaccacaaccttaaggccaaattccgctgctttaagcgctgccgtatagccccctggcccggctcctataatcactacgtcaaattctcttgccatacccgttctcccttatgttcttataaattattcttttaaattatcatgattacattatatttcaattaatttcttccaagcatttcttcaaagaaggcaagcctaaatcagccccaaatgcctgcatgccttccataccccatcccggtcaatatcatctgccacgtaatccgccacagccttaagctcctccacggaattgcccatggcaatgccgatacctgcctcacggacaatttcatagtcattcatgctgtctccaaaggccactgtctgctccagaccaatgtcatagtactgacacagccgtttcagcccctctgccttggaagcctcctgctccaccacatccgcccccatgttcccggagaacataggaaatttgaattcaggaaaatgggcttccagctccctggcgccttccggaccgccgatataaaccaatgtcctcaccggcatatccaacaattcccatccatccatgaaattgcgctccgaaacaccccagcgaagccggtccatgcggaccacgccctccgggtggatataataatcctttccctcctggctgacgcccagggaaattccgtgggcatccccgtattccagcaatgcccgaagcctttccttgtccatcagatgttcaaacaggacatttccctcagccacaacccgcgttccgttcatgtgtatcaccgcgtccggcataatcatatcccggtataccacactcatatcatggtccatgtttctgccgcttcctatggcaatgaccgagtccttccgcagcaattccagtgctttcatggcgctgtccggaattttccaggtcttatggtccagcagtgtcatatccagatcaaagctgacaatccgctttttcttacttggtttctgtatcatttttaaattctccgaataaattaaaattaggtcttttcaaaatgaaaattatctgatataataattgaggttcgagaacggagtatggcgtagtttggtagcgcgctcggctgggggccgagaggtcgcaggttcaaatcctgttactccgattcacttgttatatgtcagaatctttatcttataaggattctggcatttttttgtaccctgtacccgcaggcttccatctgaatccaaaccatatcttaagaatatcctcacccaaactccgagcaaaacatttccatatacatccggtgcacaaattcctgcgcaatcctctgaaaaagagccgttttgtcccggcgtactgccgtacagcgttttctttcatcaacgtgattaacagcagcaccgtgtcccgattgattataccacgttctgctaaattattccatccattttctatgcgcgtgagcgttgactcctgcgctgattcctgcgctgacttctcataatcagggaataagcatgaccgttgaaggatcaggcttattgctgccccggaaatggaaatgaataaacaggaggtaatcaaaacacaggaggatactatcagaattccgataaaatacaacgatgaactgaaaaagatagtaagatatgatttttaagccttgacagaataacaaatatatgaaccttttcttcaagcatgccggtcctctcaatggatggacgcagctcaatagaaaatcagataatggggaaatgtgctgcctgactcagcagaaacaaatccattcactctaaacagaatcagagctgccgcagctcaacatcatgccgcagcagctcagattccgcttatattatgcatttattatgcattcctttaatcagctatcctttttacctttcgcgtcagcaatccgctcagccaatcctctctctggatcacgaacacagacaccaggataagaaacatcccgcccaccttagccatggtaatctcctcggacaggagcagggcgcttaagaggattcccaccaccggattgatgtaggcatacgtggaaacaacagaggttttccacctgcgcagcagatacagataggaggtcaaccctacaatggaatctgcaattcccatatatgccatgggaagagcgccgcgccacgataacttccccaggtcaaaatttccggtcaaaactgcacagaaaaaaaacaggattgcgggaatcgcggactggtaaaaaatctgcacctgtacggaggcgctaattgactgatatttcagatagacggttcccaccgaccacacgatatcagcaagcagcagcagcgcgattccaatagggtcggcatttccgccggaaacactgcccaccaccaccacagcgataccggcaaaccctccgataatccccccaatccccacccagctgacgcacagtttacgggcggcaagggagtccaccagcaaaatcgtaatgggaatcaggctgaccatgaccgtgcttattcccgcatccacacgccgggaggcgaataaaagcagcaccgtgttcagaaaatacataaggacacttcccactgccagggtctttccgtcacgtaagccgacagcaagggactcatgccgaaagcccacccacagcgccatcaatacagacgcaatcagaaaacgcaggctgccggcaaaaaacggatgaatcatgctggaggacagcttatttgccacgccggccgtcccccagaaaaaacagatgttaaaataggcggcaaagggaagcagcctgcgcagagaagaatcgcttttcatatttgttccctctaaaaccgccgaaagaaccgctaggtcgtccaccccatgggtgtcatcacgcagaaaccgattgcaggtgtttcacctgtatttatggttctgtgaggcatgttgggcctcaccaccagtgaatcaccggcattcagatgataacttgtctctcccagtaccatatcggcttccccctgcagcagaatgacaatttcctcagatgggtgagtcaaaaattcttcggagtcatggccgcccggttcaatctgaaattgaatcaccatggatgacggtgtgtattccggtgctgacatcggagaaacaatctcgtaaaatatctcacttttgggaaacttgataattggtctctggtcgctctttaccatggcaggatgatgttccgactggtccaccagcaaatacggtgaaacccccagaaactcactcactttgcggagagaggccagggacggttcaaccgctccgcgttccaactgggaaatgtatccaatggaaagtcctgtggcctctgcaatatccttcagcgtcagttttttttcttttcttaattttctaattttttctccaaccataatgcaacctctactagaattcgttgagcgacggcaattccccaagaacctgttatacaaacaagtattgtcccatagcaaatgcgtctttcacaggccaggacagataacgtctccacatgccatagcttatcttaccatatttccgaaaactccgacagtatctgactgcaaattttagcaaaaaggattatcgctggagtcacgttcttctttttgaatagaaaaacggagctatcaatcatattcccattaaaacagctgctgacaaaatcagtgcctgcgcaatatataggatgccgaacaggggcatgaaaaacttccaccacttgtgcattggaattccgctgataccgatggaaatggcaagggaacatgtgggccacagaatattggagaaaccgtcgccgaactggaatgcaaggcaggttacctgccggctgactcccagcagatctcccagaggcgccagaatcggaatcacagtggcagcctgtccggtggaggagggaataaagaagttaatcaatgtctgcagaatcagcattccctgagctgcaatgattggcggcattccctgaagcacctgggaggcgtaaaacacgattgtatcaatgatcatggcgccctgaaggatgaccaggattgcctttgcaaatcccacaaccagagcccccatcacaaccgaggatgcgccttcaagaaattcttcagccatcttgcttggtccccatccgctgaccgtgcctgcaaatatgcccatcagcacaaagatgccggccagttccgcgttgccccatcccaatttcagagagccgtagaaaatggctatcagggatacgaggatttccagaagaatccacatctgctttttcgtggtctttgtgtttatgatttcctcacggttaaagttaatatccagcttatccccaagaatcagactcttagaaggatttttgctcactttctgtccatagtagaaaatataagcaattcccagtgtactgaaaatcacaaaggataccacacggattcccattcccgaaaagatgggaactcctgcgattccctgagatacgggtactgaaaacggattgagcgtggcggcagaccagccaatccccttgcccagctccagtatggcaaatcctgccagggcatcatagcccagcgccacaccaagccccataaacacgggaatcaatccattatactcattccacataccaaaggttgaagaaagtacagcaaatgtcaggaagaaaaccgggattaccagctttgccctggacgagaatcttcgcagcagcgaaccgagaaacgcgttaaatgcgccggttttaagcaccatgctaaaagcaccgttaacaagaaatatcagcatggttacttccgcaccgctgacaaggcccctgtggagagaactcagaatggtcaccagtccggccggatgtttttcctcaagggtgtggaaggtgccgggaataaccagtgtacggcttactccctccacttccactgtctgggtatcaaactggcccggcggaacaaaccaggtacagactgccacaaacagaatgatagcgcagataataacatagacatgcggtattttaatgggcttgcgtgctgtggccgcagttccgccattggtgtgtacatttttattcttttgcatatacattgctccttaatcgaacatattcgttgtgatgtgtcagttccaattcgccctcagtacgcgcagcagatttttgccggtcagttttgcaatatcttcctctgagtaaccacgccgtttcatttcatccatcacattttccagctgccagcagccttcaaaccctttggcatggcgttcatccgaccgggtgcccacgcagctgttatacgcccctaccactgccggataaagcacagcctggtctgcggttcccttgtcatccttattaccatccagggtattgtcagcgccgaacgacacatggtcaataccaataagattgaccacataatccacatggtctacataatccttcacatccggacggcagcccttctcttttttccaaatcaggggagcccagggggaaattcccatgacaccgccgttttccttgatagcaagcatttcctcatcggttttggttcgtacgctgggtgtgatgttataaacaccggcatgggtaacggcaacaggcttttcacttagccggataatatccatggtggtctttttacccacatgagacagatcggccagcatgcccagacggttcatcatcttaaggacccgtttgccaaagtcagtcagtccgccgtcctgagactcgcagcagcccgtgcctatgaagttagcatcattataagtcatctggatcacccgcactcccaattcataaaaaacgcggagctgctccagtgaattctcgattgagttaggattctggaacgctaaaataagagccttttttccatcttcctttgctttatagatatcggctacagactttgcaatcatgaggccatatttcgggttgtccagcatattgtatatcttaccaatactcctggtgctggcaacatacccatttccctccccgggaatggtcagaaaaaacgcgtccattttagaatgcagtacatcctcggtgacacccgtaaattcggtctcggtaaacgcgcaaccatcaatgattaaatcttctttcattttttacctccactaaaattttatttaacaaaagtataattcggtcttgttcgcaacctcatccaggcttttgttcatgccataagagtatcatatatacatgttatttacaagacagttcttccacataatcacaaattctatgactatatcaattttttattgtatattttgtatacttttcacaagaattgttttttaaaggctctctccttgactttatactgtcttgaatataaaatgaaataaaattatagtataatttcaaaatcggagggaatattatgagccaagctatccaaaaacgtatcgcatatattggcgcaggccagatgtgcgaagcaatttttagtggtcttatcagttccggagccattttaccggagcatatcctgttgtatgatgtaaatgaatcacggcttacagacctgcaaacccgttaccgcacaaacatcctcacgccttccgcccattcctatgaagatttggtatcatgggcagatattgtgtttttgtcggtacgcccccaggatgccagagaaacactctctaaagcaggcatgctcttccggccggatcagactgtaatttcaatcatgggcggggtaaaactctcctttttagaagagtatatcaaaaacgcggcagtggtacgggtgatgcccaatacacctatgctggtaatggaaggtgccgcgggtattgccctgggcgcccgctgcacttcccaaacagaggagttggtaacctcaatttttaatgtaatcggaagcagctatgtattgcctgaatcactaatcgatccattgaccggaatcagcgggtgcggtcctgcatttgcatatctctttattgaatccctggctgacggcggtgtggagatgggactcagccgtgacgtagcactgagcctggcagcccagtgtctcattggagccggtaaaatggtactaaagacaaatacacatcccggtattctcaaagaccgggtatgttcccccggaggcggcacaatagccggcgtacataccctggaagaaggaaaattccgcggcgttgtgatggatgcagtggtagaaagcatccggcggatgcagaatgtgggggataaagcttaagagcaggacctccctcctattttatccacaatcattcttccttcaattcagttatacacaacaccagacctggtattttcagacgatttacatgaaatatctagtgttttcggtggataatgtggataactttgtggatatcctgttaatcttctgttgatgccatgtggatgttcttttgcccgcacgctaagagggccgtacaccttgggttgggtgtacggccctccttcttattccagcaaatcctcataagaggttcccaaagctgctttaatggctttcagctgagaaacctttatatgctgcgtccctttttcaattttcaccaaagcctctcttgtaatgtctgcccccatcagctgcaggatacggaccaggtccgtctggccgatgtcagattccagcctgattctgcgtatgttggcgccaacattggttcctttatcattttttatcacatccattacccttcccccgtacgcataattccattccataaactcacttcatgaacccatttcagtccatttcacccttcatattatggagattttatgttataatgggaccaaaaccagtccatcatttaaagaattcaatgaggtgaccctatggaacagtatgactttacagacaccggcaatgccaaagatatctacggattactggattgcatgtcggaaaaggaactggaaatggccagggaggcggtccgaaacatccgtgaaaccgcgcagctggcccaattcgagcggtacaatgcgtggttcgaccacacccttctccccatcttcaaggaatatgcccagatgacctcttccctgctgcagattgagcgggataacgggaccatcgacgtcctattccgcaacagcggcggtctggacatcacagagaactgtaaggggatgtatatggcgctcatgatagctgtacatatattcatggattcagacgccggagacgcggttttggccctgacctatgactgctgcaggattgtatcataaaatgatgccagctcatcctgccgcccggccaccatccgctccatatccgccttaaagcactgcactggatactgatacccctcatatccagccatccggcagcgttcccggttcacctcatgacagtggaccggctggaacagctgccccttctttaccagggccgggattttccacagacagttgtccatctggttaagcccggccacagaacgcctgccatgggtctttgtgacccggatcccccctgcctgctccagataggcatggatttcttccctgccgtatccctccgactccatggcctgctccagtccttccagaaaatgctcccggtaatgattccatgcactgccgtccattccgcacagcaccactgcaaaacggttgccggcattgaccgccgcctactttaacagctcatcataggtcgtctccagtatgaccttgatggcctttagctgggatactttgatatgctggatgccccgctctattttcaccagggcctccctggtaagatttacctcaaagtcccactcttccaggtcaatcttctgaatcagctctgtctgtccaatccctttttcctttcggattctgcggatattcattcctatattcgtattctcatcgtttttaattatatccattcttccaccctgaatatctggactgattttagtcctttttgctcttaatcttattcaaaatttatgatataatgggaccagtatcagtccaaatggaggtcaacccgctatgccagtttgcttttttgcctgtgacgacacatctgtcctttactgtaatgatgactgtctgaaatttttccgggagcaggttcccgggacggaatcacctgcggcagcccaaaaggccgcaagccgctttccgggataccaggtatttcctctcggaccatacacctgctgcatgtttacattttcccggaccgcctctgcctccgggttttcccagggtaatgacaggctgcctgtaatatatgaatccgtgctcaacgaggtggaggagggagttgtcatatcagaccatgagaacagggtcatattcatcaaccgcgcggcagaggccattgaaggcgtggatgcccggatgtccctgggcaaacgcatggaggagctctatctccctgtgggaaacggaaaaaagaagaacagccatgccgctgtcctaaacacaggcatcgctcccaacgaacatttgaaccaatatgttgtaaagtcatcacacaagataatgaatgtggtggaacgcatgtatccggtcaatatccatggccgcaccatggctgtgttctccctgattaagaacctgcctgtcatacagaagtccatggaacagagcctggagctctatgattatttcagggaaaacactccccacaacggtacccgctataccttccggagcattgtgggcagcgatatacggtttgtggaggcaatctcggacgccaagtgcgtagcccggaaccagaccaccgtgctcatatacggcgagacagggaccggaaaggaattatttgcccagagcattcacaacgcaagcccctatcagaacggcccctttatctcggtcaactgcgccgccataccttccaccttgttggaaagcatgtttttcggcacggtaaaaggctcctatacaggcgccgtcaacaccaccggactctttgaacaggcccggaacggcactctgttcctggatgaaatcaacagcatggacatctccctgcaggcaaagcttttaaaggtcatagaaaataaaaccgtgcggcgtatcggagacatgaaggagcgggaaatccgatgccgtattctatgtgccttaaacgaagcccccctggcatgtatagagaacggaaagctgcgccgggacctgtattaccgcctgtcctcctgtattctgtatataccacccctgcgggaacgaaaaagtgacattcctctgctgtgcagcttttttctcaagcatttcaataaggaatacggccgtcatatccacaggatagatcctgaactgatggatcgttttctggaatacccctggcctggtaatgtccgtgagctccagcatgtggtggaaagcgcattctctgtctcccgaaaggatatggagattttgcagcttggtcatctctcccactattacagggaattttttactgcctgcaaaccggaagctgtttccgacagccaggccgccccaggccccgtttctccctgcaacccccagcccctgaaagcctacatggattcctgtgagaagaatttcctggcagcggccctgtgctgccacagcaacaatatcacggcaaccgcccgctccctccagattacccggcaggcgctccagcacaaaatcaggaaatatggattatagcgtataatatcctggcagtgacaattttatttgcgccaaaattatttacacgtccctcctgattttcctgttttatccatattccgccccaaaagcaccctttaagcctcataaaagcgttcttttaccgatgtccctcattctggcatataatttgcttttaatattactgtacatgtacagaagggggaactgcggacctgcatcgtgcagcctgcacaattcccaaaattttataaaataagggggactgaaaatggaaaacaagaaactgaccatgagggaaatgatctgctacggtatcggagacatcaccgccaacgtgtatcttcagttcatcgccctgtttgccatcgtgttctacaccgatgtgctgggtatctccgccaccctggccggcctgattttcatgggaagccgggtctttgacggcatcaacgacattgcggtgggttacatctctgaccggtacggtcactataagcgctggattctatacggctctattgccacggccgtggcctttgtcatcatgttcacgaattttcatctgagcacgaaaatgcagtctgtatacgccctggccgctttctgcttctggactttgatgtatacgtgctacgcgattccttttaacgcctttgcgtctaccatgacgcagaatacagaggaacggactctcctcaattctatccgctttgccattgtggcagttccgtccctgattatatccctcgccacgccttacctgaaaagcggcacacaggaaagcaacagcacctatggcaatatcgcgctggtattcgcagtcattgcgaccgtctgcaccttaatctgcgttgccggtatcgtggagcgtgccaaggcccccactgccagacagcgcacctcgggcaaagaatattttaaggccatcctcaaaaaccgccagctcctggtggtcagcgcggccttcttctgcaggacacttggatattatatttactcctcgtccatggcttattatttcaaatactacctgggctctgccaagctgatgggaattatcctgggcatatcggcccccatctccgcggtggcggctctctgcgtgactcctgtgtccaggtacatgggcaagaaaaaggccctgatgggctgcggcgttatctttgccctgtccagcgtcatccgttattttatgcctttaaacacagctgtagtggcagtcacctgctggattggcatgttcgtcatgagcgctaccctggccatcttctttaccatgatagcagacaccaccgattacggcatgtggctcacgggcaagaatgtaagggctgtaaactatggtttctacaccttctgccagaagattggaatggcattctccggcaccattgtaggaatcctgctggacatggccggctatgttcccaatcagcagcagacagacgccgcactgcggggcatcctcaatatatactgcctgataccggctgccatctatctcatcatgacggccttcatgctgctatggaaactggatgaaggcaggatgcatgaaattgtggccgagctggaggtaaggaggcgcctggaaaccaatgactaagcagatccgcaaaggatatggaactgtcatcctggcatcgttggcatatggtgtaatgccggtggtatccaagctattgcttttgtcgggaatgaactcagagagtgtggtgttctaccgtttttttctcacatgtttgttctcggctctgattctggctgcttttaggggatttagggccgtgacccttccacaggcggttttgctggcgctcttcggcatactgggcttcggttttaccatgcagtttctgaccatctcctaccagtatattcccattggactggccaccgtgctgcatttcgcctaccccctgttcgtaactcttatcatgctggctgtttacggtgaaaagccagctccggccaggctgtggggatgcgctgccgccctggcaggcatatgcctgatggtggatctaaaaggcggtttctccccgggcggcgttatatatgccctgctgtccgccgtcacctactccgccttcgtggtctccaacaaaaaggcatgttatggcagtctgagtcctatgctctgtctcttcgcgttcagtctgtcagccagtctgtttttcggactgagctgtactcttacaggcacactgcaggttccctgctccctataccagtggggatgcctgatggctgtcagccttctgtgcacggtctttgcattctgtacccttatgaccggcgtacggattctgggagctgcgaaagcatccgtcatcaacatgctggagcctgcaaccggagtggtgtttggcgtcatactatttaaagaaaaactgtcgttaaaaataatgattggctgtgcctgcatactggtatccaccctgattacggtcctggccagggacagccgcaaagatggaggcaagaaaatatgaatgaattattgtcatgtgataccatggtcgcccttgggaacagtacaaagtccggcaatgtaatatttgccaaaaacagcgaccggcccctgggggaatcccagcccctttgcctgtttgaggctaaggactacccggaccaggagctgttatcatgcacctacatatccattccccaggtgagccgcacctataaggttctgggctcaaagccttactggatatggggatttgaacacggcatgaacgagtggggcgtagccattggaaatgaagccgtgtggtcacgtgaggaggaggaacgcgaaaacggccttctgggcatggacctggtacgcctgggactggaacggtccaaaaccgcatatgaggccctccacgtgatcacagaccttcttaaaacctacggacagggtggcaacgcctctgtgaccatggatttccgctaccacaattcgttcctgattgccgatacctgtgaagcctggattctggacacggttaacagacgctgggttgccagacgggttaaaaatgcagagggcatatccaactgctacagcacgggagaacactgggatgaggactccggagacatccaggaacatgcctatgagatgggctacgcggacagaggacagacctttgactttgccagggcttacggcgccgtaaacctcaaactgcgcgcagcctatccccgctataaaaggcttaaccagctcctggacaggaaaaaaggtatcctgacgccggactacataggaagtatactgaaggaccattttgaaggcgaaatcattgagccccgctggagtcccgcagacggaatcctggcctctgtctgcatgcacaatatggatgaatcctccagcaaaaccgctgccggttccgtggtggaactgtcaaaggataaaacgcctgtctggtggagctgtatgtccaatccctgtatctcggttttcctgccttttaccatggaaaccgccattcctcagaaggtgtcccagggcagcgcccggtacagcgatgattccctttggtggaaattagaacggctctcctatgagctggaagaggactatccccgcaacaccgccctctggaatcctgtaaaggaaaggctgcaggagtacatctgttccctggcggaaaaagggctggacgacagccttctctgtgagatggcttccaggctggaagaagcagcggatgaaatgtatcttgtgctgcgtgacgccaatgcctccagcagccagccccagagaaaggcagcgctgaaagcagcacgcaccatggccggcattatataaccgccgcctctgccgtataaccgcctatagggcgcatcttccgggaaatcagtttacaagagactatacgcagaccgtgggctgctgacaaaagatgacaaaaaaataacaggccgggtctccgcaccaaagggtgcggtccccagcctgttttcttatcttatcattctgttggtttttccgtttccaggcgtcctcatcctgcctacttgtacagcgacagaccgtctatcagtataatgggatcatcccactcattatccgtaaccagagaaacctccacgcggatctcattctgtcctgtcacatccacgccaaaatgcatcagcttttcattgtaatggatatcctgtgatgtatagagtacagtatcattgtcaccgtatacagttaccttcgccatgattccgctgctgaactgggatgatggagctatgacgccggataaaagcctgtactgtccgttggcagcatattttacatagcttccctttcctttcagacggatggcattattccagcgctcgccggtagatgtcttgcccgatgtaatgatattgtatcccttggtggaaaggccgtccaacaggttctgcaccagatacggcgtagacaggtctgtaatattggccggttccacctctccctctgctgcaatccatacgccgtccgcaccaatctggcgtccgtcaatcactgtgttcgtggccatggctccgtttggaagcaggaagtaccatttgtcgttatccttaaaccagcccttctgcatgacccctgcctggtccatgtaataccactggccgtcaatctgctgccagcctgtggtcatgacaccgttgttatccatatagtaccagttgccgttatcctcaatccattccttgtaggcaaacttattggcgcctctctgatacttccactgatcattcacgtatttccatgtacctgcataggccggaaccgacataaccacactcagagccactgctgccaatgtaaccgccaaacgtttcttcattctgaatctcctttcattctcccctggctgccctgtcacagacagatattattcatcctgcacttgttacattataattcattctttatttttatgcaactgtgtgttcaaactgtaattaaactgtaaagattaaatacttccaggaaataccttgacaaatcaatctgtaagtattatagttacagtataaagtgtatcttttagaattacagttattacctgtctgttaacagcatcgagaaaggagcttacctatgaacacccgcgaacacacagccatgaagatgagaggaaacccggatatctcctatctgggacataccgttgatcagatgatttggagctttatggaacaggaaaaaattgacggacttaccttagccattgtacaagccccctacataccaagggtagccggatacggctattcggacagccagcggcggcgcctggcttcccccaacaccatgtggcccgccggccctatctcccaggcctttgcggcagtggccgttatgcagcttcatgaggacggcggactggatgtaaaccgccgggcttccgtatatataccggaacttcctgatacatggaatgacatcaccgttcttcagcttctgcgccatgcatcgggactgccggattaccgccgggcgcctgaattcagcccggacacaccgtggacatttgatgccctgctccaattggctgccaggaatcccctgcactttgttcctggtacagatgtggagcagagcgctaccaatttcctgctgctgaccgaaatcgtcgaacgggtcagcggcctaagttaccacgattttgtaaccaaaaggcagattgagttcctgggccttgggcacacgggcttcaaggaggatttaggccagttccatcacgaagacatatcccggaccgctgatatccaccagttattcaaaaaggacagactctatatcaatcccacggagccagccgtatcctatgacagcagcggtactcccatcacggcggcagaaactacggcgctccggggcttttccgatatttgggcctctgcccaggatatttccttctgggacataggcctggccggttctgtcctgattcatcagccggaaaaccgcgcccttatatatgctccctggaatcttcccgacggaaggacagtacctgccgcatccggctggcagttttaccatcaccggggacttatggatataaagggatccgtccatggctattcttccttcctgagccgcttcacagacgcctccgagctggtctgcgtcaccctcatgtgcaacaaggaaggggtggacttcaccaatctggggcgcaggatagccggcgcatacggcgaccttctgtccaccgggtacgatgacaaccgtctctatcttctggaaggccagttccctgcggcagaaacagtatcacgcctggaatcagccttaaaagaccgcggtatccctgtatttgccaaatttgaccatggacagaatgctgccggtgcagggcttttcctccgtcccaccacagtactggtattcggctctccccaggtaggcaccggactcatggaagaagatcagagcgtatccttggaactgcccctgcgcatcagtgtatgggaggatgaagccggaagcacatggctggccttcccacgcctggacaaggtattcggtgaatacggactggaaaaccatcccgctgtccccaagatgcagaaccttcttgaacagctggtgcatataggaggcagcatctattaaccagaaaaccacaccgcaaaaaccaacccataaaaaggcaccgctccccgcaatccgggaacggtgccttctcacattctgcctttattcttatatatacactccagggctgttcagacagcaccggacatcaggtattcttcatgataacgctttccaccacatctgccacatgctcgcaggcatcgcagcatttctctaagtatacgtaaatctccctccaggcaatgatttcaatgggatcggtcacctcggcgtgaagcctgcgcatggactcaatgaacagccggtcgccttcctcctccagagcgttaatctcgatgatcaggccgtgaagtgtcttggatttcctgaagtccgcaaactcctccataacctccttaagcgcctcgcagcagcggatgatgacctttatgaaggcaagggcctcgggacggatttgctgaacattgtttatgtaaatacgaatcagtacatcctcaatcttgtccgtcacctcgtcgatactctggctcaaaagaataatatcctcccgctcaatgggggtgataaacgccttgaccagcacagccatcatctcatgctttttcttgtccgcgtcatgttcaatccggtgcagctcgtccagcttgtcctgtaaaagccctgtatcaaaatggtttaaattatcctccagcattttggctgcctggcatccgcactcaacgcactctatgaaattctgaaaatagtaactatcacttttcttagacatcttatcttctcctttacttatccgtggaacaacatcataaacagcttcgctatcaggaatccgatgatgccgcagccggggaatgtcatgacccaggtcatcaccatgtccttaaccacgctgaagttaatggccgacagacgtttcaccgctcccacacccataatggctgtggtctttgtatgtgtggtactgacgggaataccgaaaatggaaaatccaagaagacaggcagctcccgccatatccgcggaaaagccctggtatttctccagccgtaccatatccatgcccacggatttgatgattttctttcctccgatggacgttcccagggccatggctgcggatcccagcaaaagcatccacagagggaactgtactccctgggtattgctggacccgttgaccatacagatacctaacagcatgactcccatgaatttctgtccgtcctgtgcaccgtgcataaatgccatggcggcagctccgccaatctgggcataccggaaaaatcccgtggttttccggcggtccatatcccggcaggtccaggccaccagcttgcatgaaagataaccgcttaaaaatcccaatacaacggaaaaaatcagaccatagaccaccttcatccactctgccgagttaatggccgaaaatcctccgcggatagccacggcagcgccggtaaggccagctatgagcgcatggctctcgctggtgggacatccaatggaaacagcaaaggacgaccagaccacaatggaaaaaagcgcggcacacagggcaaccagagcaattgaagtatcttccccgaaattgaccatattggtaatggtcatggcaaccgtggaattcaccatggtcatcacaaccacccctgcgcagttgcatactgccgccataacaatggccagattcacatccagcgatctggttgacacgcaggtggcaatggcatttggcgcatccgtgataccattgacacagatgaccccaagagtcagaaggactgtaatcaacaatgccggatttgtcaccagctgccgcaggaaaaaggaaaacgacatgtccataattcttttttacctactctcttaattatttactttatctttacgtaaaatttacaaactcacgattttaattctaacacggttttttatggtagtaaagttcaatttcgttaagaaacaaaggaaaatattcgtttttggataatagaaatgttatgggataaaatggaaaacgcctgtattatctatatatagataatacaggcgaagcagacaggacaaatatggtttcatactctttgtacactctcagcagaaacatactccaattattgataatgttttgtccttcatttgtatattcggtttttattggaactctggttttttattggacttccggtccgttcagccctgcatccatgctcccggaacggaacccttctgcatccagggttatatacacaaaccccatttccttcaaacggctgacgatttctttccggcctttcataaatacctcaaaggcttccggatccagttccaggcgcacgatatctccgtgaagcctgagacgtacattgccgggaaccatagtcctgacataggcttctccctccccaattcttctcagcacctcatagtccagagcagcgccgtagggcaggcgggtagccatgcagggagtggacggacgggatgccaccgatattccgtactctgacgccagggcctttacctgggccttggttatgtgcagctctgccaggggactaatgattcccagctccttaagtgcccggattccggggcggtatacatgcatatcgtcctcatttgtaccgtccaggatatacctgattcccctggcctctgccagctctgccagtctggagaacagatggcgcttacacagataacagcggtttaccgggttgttttttattgactcctgctccagctcatccacggtaataacctcatggattcctcccagctcccctgccacgcgcctggcaatctccaggtcgcaggaaggatgcaggcggctgtcaaacgtaacggcgtacacctttcttcccgtatgggcagctgcgtctgctgctgtctttaaaagcaggcttgaatcaactccgccggaaaatgcaaggcatatatcctctttggccagctgctccatcctggcctccagacactttttcatctggtccggagatgacatttcatcactgaaactgttatttaccgtattcatacgaatctcctaatctgacattatccatacatttaatcctgccggctttcctctgccttcatacgtgcctgatgatatgcggtctgaaaatccacaccctgttccctacaaatccgccggatgctttcatattccggataaaaaaacgttctgcccttgtaagcacacaccttcacatccgccggcccgtaactggtttccacctggatttcactccgatcaagaatggtcctctccgtcggataacggcggattccaatggtagtggtctgggtaagaatgatttcctccatggcctctatggatgattcacggcaaagcacagacagcatgtaggcgggacggtttttcttcatgtgaataggggtataccacacatccgcggccccggcatcaaggagcatctccatggcaaggcccagcatttccccggtacagtcatccaggttcgtctccaatacccacatggtacggtcctcttcctgtgaagtctccagcagcatggctcgaagcacattcgcctgtttaaacaccttgttccccgcacccattccaaccttaagcagacggcaggaagaaggcagccggtcctttgtccgcagagcggcggcaattgctgccccggtaggtgtaaccatttccccgtcattgtctgtaaaatgcagcttaagtccataggaggaagcaatattagcagtagccggaacaggaaccggcagtacgccgtgctggcagtggacatggccgtgaccttcagacaatgcagaaaccaccacatcctccacacccagattgtcgatgcagactgccgcactgataatgtccactatagaatcaatggcccccacttcgtggaaatgaacctgttcaacaggaagcccatgggccttggattccgcctctgccacaatgtggaacatggtccgggccatttccttcaccctctcattggaatccagacggtctatgatatgataaatgtcgtggaggttcctgtgaatgtggggatgcggatgaccgtgaccagcctcatgaccgtgaccagcctcatgaccgtgctcatgctcatggccgtgctcatgctcatggccgtgaccatcttcatgccggtgaccttcctcatgccagtggccttcctcatgaccgtggccttcctcatgaccatgctcatgctcctccaaatgcacatcaaaatcaaatgcatccagaccgctcacaaccttccgtccaaaatgcagatggtatccatccactcccaggctctccagcgcattctccagcacctgcctgtccgctcccagatcaagcagggctcctaccgtcatatccccgctgatgcccgaattacattccagatataaaatcttccccattttatctcaccgccattctgtttatttgggtcgccaggtagccggcgccgtatccattgtcaatattaaccaccgatatcccgttggcacaggaattaagcattgtaagaagggccgacagcccgtggaagctggctccgtatcccacggaggtggggactgccactacagggcattccaccaggcctgctatcaccgtgcccagcgctccttccattccggccactgccacaatgcagctggccttgtccagacgctccctctgggccaggagcctgtggattccggcaactcccacatcaaatatacggtctaccctgcatccgaaatattcagctgtctgggctgcttcctctgccaccggtatatccgccgtgcctcctgtgcacactgccacataccccttgcgctcctttcccggcttctccaccttaagtatccgggatatgggatcatacaccacctctggcaccgctgttctcaccagctcagcctgcttctcagaagccctggttcccagaacctccccgtccctctcataaaatttcttatatatttccagcaaatacgcatccggctttccctggcagaatacagtttccccaaaaccggatcgcagcttcctgtgatggtccagcttggcatatcccaaatcctcataaggcaggttcttaagctgcttctctgcttcttctatgttaacactgccggactttacctgctccagtaattccctgacatccatctttcgttctcctctctcaaatccatacggcttggccgtcccgtttccaatccttccacatacaaatcatccggccgctccgtccctaatccgtcctcaaatcaaccaccctgccgcaaacacgctccagcagctcctctgaatggctgaccaccagcaagcccaggtcccgcgtcttcacttcctccaaaaggaatccccagatctggctctgggtgataaggtccagcatggtgcttatctcatccgccagaatgaaccgggtgcgcttccccaatgccctggctatacagaaccgctgcagctctcctccggacagctcacccggataccggttcagccagtccggttcaattcccagaccgcggaccacccgttcctccacaaaatccccttccctcagaacttcccgcatcttaaggcggggatttactgacagttccggatgctgccatatcatctgcaccggattgtaaccggcacaggaagaaatatttttcccgtctaacaccacagtcccatggtccggtttctcataaccagccagtatcttgcaaaaggtcgtctttccaaaaccgctgggagctgtcagccccacacgttccccgctctccaggcttatgctgacattgttcagtattttcctgttcccattgtcgtattggaaagaaatattcatagcttccagcttcatattcccgccttcctgcattttaccatgccgccgcgaaaactgcgataagaaatttcctggagacagccttcatccatgtccgggcagcggggcccatagggacatcccgcgggcatatccgccgcatagggctgggtcccggatgctgccttaaatccgtgacggggcatggcccggaatagagctttggtataggggtggcgaagcctttgctcatcctcaaaatcctctgccagggcctcctccacattggtacctgcgtaaaataccacgattctgtcagccacctccaaagccagctccaaatcatgggtgataagaaggacccctgccccctggtccgctatctcccggaagtgggacagcacacgcctggccgcgctgatatgaaggcccggcgtgggttcatctgcaataaccagtctgggatgctccatcacggctgtggaaataagtacccttctggtcattcccccggacagttcaaaaggatacagctcttccgtatcctctcccagcccgtagcgccccatggattggcggcagcgcttcacgctctccctgtctttttgtccccttcgtacctgttctcccaccttcataagcggatccagatacgacacgctctgggggaccaataccatccggctcccccgaagctgttcctttttcttctgggtcaggatttctccctcaaaggaaaccgtcccctgacaggcggcattctgcggcagaagtcccatgaccgcatgggccagcaggctctttcccgaaccgctggatccggctacggccaccacctcatgttcccgtacctttatgttcagatcccgaatcacgggaagctccctctggcgccatccccccacatactgggaaaatgagatcatcagatgctccaccgacaatatgacttgtttttcctccaaaacaacctcctacacaacaaacctctgccacggcacaggcgattttacagatgggcctgggccgggtccagcagacggctcagcgtatccccgataaaatggaacaggaccaccacaaataccagcaaaagaccgggaaacagggccagccaccacttccccatgaccaggtatttcatgctctcagacaggataacacccacggcaggctgctccggcggcagcccgaagcccagaaaggttatgcttgcctcatgaagaattgcatggggaaacagcagaaccatgcccacaaaaagctggggcagcagatggggcgtcatatgtttgaaggcaatataaaaccttccctttcccagcttctttgcaatctgtatgtactggctctcacgaagctgtatgacctccccgcggagaagcctggccagggaagtccagtgagtcagtgaaatcccaatcagtacaccccagaatccctttcccactgcaaaggaaatgagaatcagaagcaggatatggggtattcccatgaccagatcaatgattcctcctatgacagcatccgtgaccctgcccagacaggcggccatggttcccaggatgaaagccaccaccgcgctgatgcatgccgtcaaaagcccgatgcgtatgctgatggatagccctgtaaggctgcggacaaacatgtcccgccccatccagtctgtcccaaagggataggccaggctgggcggcagattttttctggtgaaatccgtggccagggcctgctcccttaatacctggccggcaatggcaatggctgccagcaggaggaccgataccgccagcagcgcagccatggccttgcggcggttccatcggtgtctttgtgcgctcatgccctgctcctcctgattctgggatccaccgttccgtacaggaggttggcggtgaaattccctaaaaatacaatggccgcgctgataattgtaattcccataagcagcggcacatccccgcctaatccggctgtcacagccgcctgtcccaggcccggataggaaaatacctgctccaccagcacggatcctccgaatatctcgctgactgaggcaaactggagcgtcatggcaggaagaaggatgttgcggattccatgcctgcggataatggaccattctgactctcccctggccctggcaaacagcacataatcgctttccatgacctgcgccatcttctcccttgtatgaagggcaatgttggagatgcctgtaatggacaatgccgccgcaggcagtatgccatgaatcaggcggtccttcatggtcacagccgacgcctccaccccgattggaacagaaagtcctatggggagcagcttaagccagaccgcgaacacgacaagcagtaccagagccacccaaaaggccggcgtactggcagttaccagggcataggaagagataattcggtccgcagtctttcccttctttgccccggcaatgattcccatgagaaatccaatcaatcccgataaaatccatgccgccgccataatccaaagggaattggccagcttctccccgattacctgggcaacaggcctgcggtacaaaagggagatacccatatctcccttaagaaaatcaccggcccaggccagataacgggttacaggcggcgtgttgacgccccagtattcctggagtctggcaatctgctcgctgctcatgcttccaagggccgcctgccccacattggtggtaagcggatccaggggagaaaccgacaccaggaaaaacgccgccatactcaccagcaccagcagaaccgccattcgtatgaaattaacacccgcctgtttccaactcatgattttatccttcctgcccacatacaattctgtctgattttattcccagctccactggtccacattatttacaatggaccatccgtgtccatggggatggattttctgttccgccacctttagtccgtccctggaccagtacagatggtctatattaaccagccaaatccaggggatatccccatcctgggtcactcccgcggtcccgtcccactgggccttcttccacagctcgtaggaatcctccagattcccgctggccagggcttcgtccatgtaccggtccacactgtcattggcatagggagaatactccgccaggccggtatccttcatggtatggtaaatattgtaaagctccataggcgtatgggcgccccagccccacataagcggctctgtctgggcgcggtcataggcgtcatcccagccaacaccctctatcttcacttcaattcccacttccttaagctggttggccgtgtccgctgccagagcctggcgtacggaatcgctggccgggtacatcagtgtaaatccggccctgacaccatccttttccctgattccatccgctccagccttccatccggcttcctccaaaagctctgctgccttttccgggtcatactctgttttcgcagactcattgtaccagggcatcttgtcacacacgctgtatgccgggcttccgtagccgttcagcacatggtcaatcatttcattcctgtcaatcccaatgttcacagcccttctcacctgtacatccgacgtaaaatcatttcccacaacggttttgccgtcagttacagtgcctgactttacagccggaaggttaaagccccggttatccactgtctcgaaggaaaggagctcatatccgggaagggtctgatctgaataggacgcagccgtataggccaggtccacctgcccggacatgacagctgcataagccgcgtcctcctccatgaaaagtatggtcactttcttcattttcggctctgtcccgtaataatccgggttcgcctcaaatatgacctgctgtcccttatcccactgtttcatgatatatctgccggatccaatgggatgtgaaccgtaatccgccccataggcatgttccggtacgataccgacaattgccatggtatagggccagatggagtaggggcgtttcatatgaaataccaccatggtatcatccagcgcctcagcactctctaacatggtaaagtcgttgacagagctggtgtcccgcagggtattgtatgtaaatgccacgtcccgggcagtcagcttctctccgtctgtaaaattaacatcatcccgtatattcacggtccaggtaagcccgtcctggctcacctccatactggttgccaggtcatatcctattttcaggtcagcagtcgtcacggtcagcgtactctgaatcagcggctcgtggacatgttcgcccgccccccatccgtaggcaggatcaaatccggcctccggctctgaggttggtcccatgacaaccaccacgtcgtcccttgttccattattccccgtctccccggcgccatttcccgcactgttttccgcacggtttcccgcgctgtccccagcaatatctcctgtacggtttcccgcactgctccctgcactgtctgcagccgcagatatcccgctgtccttagcgctgtttcctgttccgctgcctgcgcagcccgtcacagccatggacacggccgccatggctgccacggcatatttcattcccgttctcattcctcgtctcattttcctctccatttctttttcatgccctgtccgtatgcctggattccataaacttacattccatacactcacatcctattcctgtaagcgcagacgccatgaacttaatccgcaccccggcgcaaaagcataaaaaaataccagaataagtgtattccttgagaatacatcctaccttcctggtatcccttacttcttaaaacttattcaatctcactaaaatgcgcttgtctggttcattctggatgctgacttctgtcagccgttaagaaaattatacgcaaaagtccgcaaaaaatcaacgcttttcttgccaaacgtttgcccatatattaaacagtctgcctgaaccatccccatgaggagaaaagttcccggggaaccaacaccgccccgggaacttttaagcgtatctatgcgcctttcttaccagtctcttaatttattcccccttctgctgaacctctacggtacgtccctccacgtctttcgggtctcccacggtcagtcccgggacctcctcatccgggcacgcgtttgtccatgcaagcttcatgacatcgtctgctgtcagctccttcttctggatcactcccaggcggatgtagtcggctgcaatattgccaagggcctcctctgtgattgcgtcagacaggccgaaatccagggaatcccagaactccagctgattttcaaactcacctgtcatcttattggtgtcaaacattaactgcacggcatcctcagagtggagacgggcatactgccctgcacgtttaattgccataacaatgtattttgcgtgaaccgggttcttcgcaagaaaatcattgttcatggcggttgcgcagcacacctctccctcgaactcatcgccgggggtaatggagcataccttgcgcatcttatctctgtaattggcgattacaaaataatccgagaaaatggaagcgtctatctcgccgctctccatagccgcaacgctggccgcgctgtctgcgatatcaagatattccacctcagaggtagggtctatcccctccccgtccagcattcggtagataatattctggtcggagtttccgatgccgtcatggatggcaatggtctttccctttaaatcctcagccgtctttatctcgctgtcattgaatacgtagatggatttgcagcccatgtgggctcctgctacgaatgtcatatctacaccgtttgtcaccggcacaagcatggttgcgatatggtctgttccccacaggcacttccctgtgccaaccgtgatcacaacagactctccttcaatgtattccgcgttaataccgtaatcctcataatagcccagtgcctcggcaaggtataccgcagacacgcaggcccctccgttaaacagataatttaatgttgttccgaaggcaggctccttctgcatggcctcccaatcctcctgggacacagcctccgggcgggcggcgcctccggttgcctcctcaccggttttcccggaatcctgtggctctgccgctgaccctgcttccgcttttgtctccgctgccacagctgctgtggatgcgctttctgtggttgcgccttctgtgggagagcctcccccctgttccccgcaggcgctcagggataaggccatcattcccgcaagcgctgccgccagaatgcgtttcgcatttgtctttttcatcatactgttctcctttttgcttttaatagttatttatgtacacaaaccatggggtctgcgtttttttctttgcagggtcctgtccgatttaccgctgacctctgttttttccgccgaagtgcaggcggttgaggatttcattccggcaggccacaaaggtctgcgatgagcgctccctggggtaggcctggtctattttaatatcagaaaccacccgccccggatgcgcgtccatgacaatgacccgggttcccatataaatagcttcatccacatcatgggtaaccatgagcgcaagctgctttttctcctgccacacctttaagatttcatcctgcatattcatacgtgtgaatgcgtccagcgctcccaggggctcgtctaacagcagtatatccggctcgttaatcagagaccgcaccagtgaaacccgctgtgccatgccgccggaaagctgtcccgggtagtcgttcctgaaggattcaagaccgataattttaagcatcctctctaccttctcctcattccccttcagctttccctgcagctttaagctgaaggaaatatttttttccactgtcagccatggaaaaagggtgggtttctgaaacatcattccccgctccggcgacggccctgtaatctgcgccccatttacggtcagatagccggtggtaggcggaatcagcccggccacaaggcggagtatggtggattttccgcatcccgacggccccacaagactgataaattcaccgctcttcatggaaagattcacctcgtttaacgcgtgggtaacctcgtcgtgctccacctttgcaaaactttttgatacattgtccaaccgaaggataactgtattttctgccattatttcactactccgttctgccacctgagaacccggcgtttaatcaaatccagcacctttgtcacaatagtaaaaataaaacagatgacaaacagcgctgcaaacattttgtcgtaggccgcccaggatttagcccagttcatataccatccaagtcctgcctttacccccatcatctccgcaatcatgattgcaacacatgaggagctcatggcctgggtgcagccctgtaaaatagagggcattgcatgaggaatcgccacccggaatacaagctgcccctcacttgcccccagggtccttgcggcctcgaagaaatccttgtccacattctggatgccggacatggatgccacggtaactgcaaaccaggagccaagggcgatgataaacacggctcccctgaacagggaggctgccacaaccatgataatgggaatccaggttgcggtgggaataggtcccagaaatttgataacgggattaatccagtaccgcgccttctcagaataaccacaggtaattcccgtaaccaatcccagggcaattccgataaaatatcccaaaaacagcaggcgcagcgtgtgaagcgtacattcaagcagataagcccggtcctcccatgcaatgttcaatatgctgttcatacacggaacaaagggctgggacaggatgccagttttcagagtcagataatcataaaaggtaagcaggagaaaaaaagcagaaaacaaaggcgctcggtagcgcaggtcctccgcagtccgcctgtcccccttccagtatttaatcccggctgcaagggcatagagtgcgtatgcagtcataaaggctgccactgcccacacataggtgtaaggatggctgtttggacttccgtttgggacctcccagtactcgataacagcgatgaaaccgcagataaccggaagcagcataataacgaggtccaggattttctgaccacgtgttttttccttttgctccagttcctttagctgctgtctcgtcagatgtcccagcggatttatctggctgctgccagagacaggcttttcctccatagtagttgacatagtccttctcctctgcatgtgatggatattaaagcattaaaatatcgcgtttttattttaatccaaattcaacggactgtacaatttaaaataactaagatggaagccgggtttatagcttaattctataccagtttttatgagtcatcagaaaccggcaaaaaaccctcccgttttatggatgtttgcgcaaaataaacgcaataccataaaagggagggtgttgatacggcagtgtacattgcctcttattctgttttcctaaggtttacatcagcttaccatgcatatggcacgcgcacccgcagtcctcctgtcccttaccttcatacgcctcatccttcatcatcagatggacggcgcccagcttaaaggtctggggaagggccaggatattgggattttgtcccacgaacttttttctggcgtcagccagcgcttcctcgatggtggccctggtcttaaggcccatccccctggcatagcccggttcctgagcgccgcacagatagatggcggaggtattcatttccgcgatatgaccgcagctaatcatggaaaagccgtggaatgggtggaacgcattgcagtaacggtattttctgatgtattcctcattggtggcgaagtattcgccgtaccggttcatgtccggcaaggtattcataaaatcgtgctggaacatctcatacatttccctggtgtagggccacagctcatcgtggaaatagccgttgcacagggaagagcagataatcacgcagttatcgctcatgatacgcttatgccggatgacctgggccgagatggcctgcatcagcataatgggattggtgcccatgccctcgccgtaatggaagaactggggcatgccgaatatcattacatcatacttcttttcagcccacggcacataggtcctcttatccgccgtaatccaggagtggggctgcatgacttttgcatatccgctgttaatctctatctgacgggacctggtgtccagcactgcgtcacagcagaaaaacttctttcccatgcatttttccatgtactggccaatctcatcaaattttgtcctcataagcgacgttccgctgaccggagtaaaatccttccggtgcatgacctcaggtacatggtgggatgctatggatcgccaatgggtgatgcccgtggcgcagtgcttataccctcctgagtagccgccgtaggggttgccctgggtgtgtccgatcaggattgccacatcgctgtcatacacatatttattcatgagcaccggatcgccgcggtccgtggtgcccaggtccaccagatgctcgtaatcctcgctgtcatggttgataatctgatgtgtgtgccagaactcatgaaacagctcatccccaaggatgttgtggatttccgtctccgtgttcttcctgtgaagtccgttggaacagattaaaaggatgtccttcttctccactcccgcgccgtacagctccttaagtatcaatttaatggatatttttctgtgggaagtgggctgttcccctccctttaccctgtccgggaaaatgatggtcactttggagcccttatgggccagtttggacagtggctccattcccatggggtttcgtatggattccagggttttctccaccagctggtcctccgggatacagggcgggtctgccacagtctcgccgggtatgaacacgtcggtgttgtcaggaagctctgccgccataagccccgcaccatattcaaatgataacttcatatgataatcctcctgtgattttcaattgggttcgtaatattcagtctcgctccagataggtgcgcacgatctccagatactcctcaggatagaatccaatctgtccctggaacctggtgagggcaatcaggccgccgtccatgacaggaaccgaagccagcatcctggcattgtccgtcttaagtccgcctccatagaccacatccatccctccggtcatctccttaatataggtaccaatcttcgtgatatatgcttcatccggcggcgtcttgcctggcccgatggcccatatgggttcataagcaatgaccaccttctccttatccacatccttaagccctgtttccagctgcgatttcagtacttcctgccagtgttcctgttcaccggctgtttctccgatacagtaaagaacggtaagaccggcctggatggctgccttgatttcctgattcagcagccttcctattgcgtcttcatccgtgaccccggcttcttccaggattccggccttatccctgcgctcctcgcagtgtccgataatgacagaactgcatcccattgccttagctgcattggccgtgcggttggtggtaaatgcgccgaaattgccgttctcagccgtatcatccctgtacactccctgacagccaatcttaaccggactgtgctcacacagggcttttactgccggaataagatgggcttccgggaaatacatgacgaactccacatcctctgcgctgtacgccttcagcttttcctgggtgttctgaacaatatagctcccccattcctccatgggcgccacaccgttgacccctccgtactccctgggtatatcgaaccgtttcaggttcagaaatatgtgtttcattttcccactcccatcttttcatactcttctttaaaatccacaaaatccctcagttctggtccgataagaggcctgcaccatttcagaaacgcgtccgtcacatcattgcccctgtcatttatgtactcatccggcagaacccgctcatgaagcatcacctctttgatgggtatggccgaggtatggacatgatacccgccgtcctctttctcatcccgtataaggccgaccatgacgccgctgcggccggccatggctgtgcgcagcgcctgacggccggccagaactgcctcgtcccggtccacaggagactgccaggcaatggacgcccttccgcaaagaccgggcttttcgcttctggccttgattcccagcttctgaatgaccagattcgccagataagcgctgacatccccatagtaagtcgctctcccaaccttaaaaacaggaggcacaatgggctctcctttttcatttttaagcccctcgctggcaaccaccaccacgcctcccttttcatcgtaaaggcgttttacatcctccaggaattcctcctcatgaaagggacgctccggcagataaatcagatggggcgcatcccccggcttcttcctggccagggcagacgcagctgtaatccatcctgcgttgcgtcccatggcctccatgacgcacacatggatgggcagggctttgacatccgctcccacctctgcggcggacgcggcaatgaacctggccgcgcttccatatcccggagtatggtctgttatggcaatgtcattgtcaatggtcttgggaattcccaccacatagatgtcctctcccctgcacgcctcaaagatgcggccgcaggtatccatggttccgtttcccccgttgaggagtacataccgtattccatatttccggaagattcccgccatggcattgtagtcctcctgtttaagggcataccttgaggatccgattgcggtggccggcgtctgaagcagaagactcagcttttcctccggatactgcatcaaatccagaaaactctccttcaggattccttcacttccgccaattgccccgtacaccctgcctatgctgccggagcttttggcttcctccactacgccatacagggaagcattgataacagctgtggggccgccgccatggaccaccagaacatttgccgacattgcctctaccacctttcttgttgattcaatctggattttattaaatctgcattttcttatagcgctcagccatctcctccagggaaacctgttccaccaggggagctttgccgtaagagccaaactgtacgatgagggttcccaccacttccttcacgccccgttcaatacagtccgttatggctgccgtgtcctcatccggtatgacgccggtcatcaccgtatccatgattggagtcagaaatactcttgggtcaaactgctctcttttagactctaaaagctcatagatggccccgatggagctgctgtttctcttctccgggttcccggcgaaaaactccttcatattgcgggtaacagccagcctgatgtccgtatccacattaatcttgttgataccgcatctggccgcttcctgcagttcactgacggcaattccataggtgccggtcagcgtgcctcccagcccattaatttcatccacaatataggccggaaccgtggacgagccatgggataccagtgccccgaaaataccctcgtgattcagacactcccggatggccaccgctatctccttgcgcagctttacattctttcccttggaagccccgtgcatggttccgtaggatatggccagggcatccacgccggtcttccggaaaaattcaactgcctttaagggattggtataagtggatccctctgaaaacacatggtcctccaccccggccagcactcccagctccccttccacgctgacgcctcttgcatgcgcgtatttcaccacctcccgggtcagctccacattctcatcaaaggcaagggacgacccgtctatcatcacagaggtatatccccctgctatggcggccgcacaggagtcaaaatcccgcccatggtccagatgaaggacaatgggtatggggctgtcctccccatattttttcacggccccggcaatattttcagcgccctttttcttatcctccagggtcgcgttcataaagtcgcatcttccccccataaagccgtttgccaggtcggccccctgcagtatggcagcggagcggaacatctcatggacctggatggcagcctttgcctgggccaccgcattgacgttgaaagcgccctgggcaaatccatgtttaacagaagcctccatgagaggtctcattggaatcaatgtcatattttaccttccttttccgacgtttcatccccggcagcgtcatgccttttccttagaacctgcaagccggataatgtcttttatatcttcgcgcagccgcagttccgcgtactgtgataatttccaggcatggccctggtccttcccctcagccagcccctctttcagatagttcacatactggcagcgcacctgggtaccaaaattgattttggccactccgctgtcaatggagcgcttcaccagctcctcatccatacccgtacagccgtgaagaacaaagggtatatctgtaaacttcctgcactcctccagcacctccacccggatatccacagggccgttgtaaaacccgtgggcattgccgatgccgatggccagtgaatcgggatggcagagcttaagatactgcctcaccacatccggatccgcaatattggatgcgcctatcttgtttcccctgtcatccaggcggcacagctcgccgatttccgcttccagcggcacgccaaaggacctgcacaccctggccactgcctctgtggcagccgcattttcctccacaggcagggcggaaccgtcaaacataatagaggtgaatcccagcttcagcatctccatgcagcgctcaaagctgtccccgtgatccagatggattgcaaccggcacagataccttgccggccatccattttgccgtctcataaaaccagtcatggcctgaataggccccggtattcacatagtgggccaatataacaggggaacgaagctcctccgcagccatacatacggcccgtatgatgtcaaaggttcccccctgggtattgatggcgggaaccgcataatgtccttcataagccttctgaagcatttcataagtggttgtcagcatgcttttctccttctcagatgttcacgatgactttcagataatcggacggggactgaatcatatcctttatggtatcctccacctggtccagttcaatcatttttgttatgatggcgtctgtgggtaccttgccctcgtttaccagactgatggcctccgggaatttcccgttggagtttctggacgggcacacgtcgatttccttctgcatcaggcgcaccgtgttaatcaataccgggtcatggggccatcccaccagggcaatccgtcctccatggcacacataattgtgcatgttctccaggatcaccggcgctcccgtacaatcaatcatggcctcaggcagcttaccgcctgtcacctcccgcagatattcctccacatttccgtctttggagttaaaggtgcatggtactcccagctcctttgcgtaatccaggcgcttttgcagcacatccaccagtatgggggttgcgccgtaattaatacaggcaaatgcagccataaggccaataataccggcgccgaacacaacacaatgctctccccttgatactctggccctggtggccccgtgaaggccgatggttaagggctccaccagggctgcatgggtaaaggtcagttcatcgggaagcttatataaaagctgcaccggatgaaggaaatattcggacatcatgccgtccttatgtacgccgcacacatggagatccgcgcagttattgaaacgccctgccgcgcacatatgacacttgttgcagggtacatagggttccagggccacacggtctcccggctttaaccccttgtcattctccccgatttcctggatgatgcccacgccctcatggcccagcccgttaatgggatagcgcatggtggggttcactcccctgtaagcagtcacatccgaaccgcagataccgcacatttccatctttacgattgcctgtccttctttcagctccggcataggcaaatcttttatcaccaggtttcctggctccggcagacataataccttcatgttttcaatcctcctgattctatatttctaccaccatttaatcttgtcagttatatagttgcggtattggataaattgggaggatgtgatatccctgggtcttggcaggtcaatccgtacctcctcctttatcttcgccggcttgttgctgagaatcagcacgcgctccgccagatacacggcttcctctatgttgtgggtgatgaataccactgtgctccccagttccttccacagacgtataacctcatcctccagataaaaacgcatcttcacatccatctgtccatatggctcatccatcagcagcaggtcgggctgcatggcaaaggaacgtccgatgatgattctctgctccgctgatacggacagctcgcccggataagccttcctgaactcctgaagtcccatcagatccagtatctggttcaccctgcggtcgatttcagccttgggaattctcttaatcttaagtccataggccaggttgtcctccacggtcagccacggaagggcgcttggctcctgaaatacaaaagaaatgttatgtttgcgcgggtccgcagggaccccgtctatatacagatcgccctcgctgggcatatgaatcctggtaaggcagtttaaaaatgtggtctttccgcagcctgtaggccctactacacacacgaactcgcctttacggatattaaatgacatatcgtccagcaccagcaggtcgccgaatcgctttgtaagattcctgacctcgacttttatgggccgggtatcctctctttcaggcatttttgtcctcctattaaattgctaaatcagtgttgtcggaaataaccgtacgcagcttcaggaattccccgctcaccatatcccttggcctgggtatgctgatgggatatacttcctttaccgtggccggacagtcgctgagcaggatgattctgtctcccagatagcaggcttcctctatattgttggtgacaaatatgacggtacgcttttccttttcccagattcttaagatttcctcctgcatctgatagcgggtctgggcgtccagctgtccaaagggctcgtccatgattaacagcttgggatccgccgcatacgccctggcgattcccaccctctgcttcatgccgcccgacagctgggtgggataggatttctcaaatcccttaaggcccaccagctctatgtaatgctgtgcaatctccctgcgctgtcccttggacatgccgcggaatttaaggcccagctccacattttccataaccgtcttaaagggcatcagggccagcttctggaataccatgctgatttccgggtttacgcccttccactccctgccgttgtacacaacctttccttcggtctgctgctccagtcctgcaatgatgttgagtaacacggtcttgccgcagcgccccggtcccaggattaccaggaattcgccgtcgtttacatcaaagctcacatcctttatggctgtaaaatatcccttatcgctgaaaaacgtcttggatatcccatttatttccattcgcttatttagttgttccacgggcacaccaccttctcaagtttttgaagccccagtgacaaaagggcgccaataattgcaatggttatgacagagacaagtaccagggccatatcgcttccctgccagcctctggtcaccagtgctcccagtcctttctgggctcctaacatctcagccgcaagcaccgttgtccagcctgagctgaccgaggtccgtattccggcaaagatggagggcagggctgtggggataacgatatccgtcagtatctgcctgttatttccgccaaatacatggcctacatccagattgattttatccaccatctcaatccccgtggaggtgttgatgactaacggcacaaaggttccgatgaacaccagcagcacctttggaaattctccgatgccgaaccacatgattacaatgggaatccaggcaatgggaggaatggggcggatgacctcaaatatactgccgaagaatgccttgcattttttattccacccaatgagaatgccgaaggaaataccaaaggcccatgcgataagcagtgccatgagtacacgccttaagctggcccatgcatgtcctgccagggaggtctttgcaatgggtttggtaaatgttttcacaaaacgcgcccatacgtcggccggggcgggcatcagctccgggtgactgcccgaaaacaggacccagcccacggcaatcatcaggattgccagtacaggcaggccgtagtacaggacgtttttcagtgttttctgctgtttgcttgctacatccatattccttactccctcctacctgtttaccttccagcgcaggaaatatttttccgccctggacaaaaatcctgaaagaatggctccgatagcgccaatcaccaccatacccacgattacaatatccgggcgggccactgtacggccaatctgaatcatatatcccagtcccgcgctggctgccagcatctctgccgccaccagggtggaccaggaatttcccaatgccacacggattccggcaaataccatgggaagggaggaaggcacccccactttccagaatatctccgcattggaggccccgaaggtcctggatacattgattaacgtcttgttggtcagctttatgcctgtataggaattgatgacgcacggcacaaaggcggtaaaaaagataatgagagcctttgccttcagcccaattcccatccacaccactaccaggggtatccaggcaatggggggaaccggcctcaccagctcaaagatgggacggatgaaacggtccgcataggtccaccagcccatgaccagccccaggggaacgccgatgatgatggctgccaggaaaccggataaggcaacctggaggctggccagtatattcacccaaaggacgttgccgtcaggggccttattcgcaaacttatacatcagggtctcaaaaatctgagtgggtgcgggaagcatcctttcattgacaagacccaggcttactaccagctgccacacggccagaagcgtgatgatgcctgccgcgcttaacagggcgtaattcaggccttcctttgatttctgctttttccacgccaaaaggccagcctctaatttctcatttccagttgccatatcggtatctcaactcctttttaatttgcggtttcggtcagaacctcatttaacagctttccatctgtatgtcccacgaatctctcctggtcgccttccttatagttgcccacgctgatgaagaaatcaagtacgtctaaaagcctctggtccataactgaatggtcggaaccctctgccttgtcatttaacatgccgcatgcctcctgaagtgtgtaatatgtatcggcctccagatattttgcggttgtctccctgtccatggagcttccgttctcatcgttcatgtccacgcagtagtcaatggccttttccttgttctccttcatccagtccatggtcttaaagtacacttccataaacaccttcatggcctcatacttatccggatcggcatagctgttcttatttgccacaaagctgcacatcagaccggaatccgccatgggaccgctggccacaggtatatacttatcggattcagccagcatcttgaaggttccccctgctcctgtcagcacacacacgtcgccttcgcctgccaggaatgcactgtaagccgtagccgggtccatggcgataaagttcacatcgtcaaccgtaagtccaaagccttccagtaccttaatcagcacatactgggtaacgctgcccgtgttgcacaggatggattttcctttccagctgtccgcatccccgtagatctcatcgctcagactgttatgtcccttgccggccttcacgatatctgaatcatttctggcaaatacatactgtgttccgtcgtccgtattactggatccaaggaccagcgcatcgtatcccagaacgccggcaaacacgccgcccacgccggtgcagccgatatcccagccgtcagatgaaagagattccatctgtaccgggccgttggtgaacagcacctcctcaatatccagtcctttttccttaaaccagccttcctgctccgcaatgtagataggaagataattaaggctgcccccaatgcctgagaccgtaagctcgtaactcttgtccgctgttttgctgtcacctgttcccgatgcctcagcctgtgtatccgctttcttggattctgaaccagctccgcagcctgataccatcccggcacacatgactgctgccattgtgactgccaatgtctttactaatgattttctcataacgtttgacctcctgtccccaaatggttctcttatttttgctacatgtttttgcgtaataaacagccgcctttatcctttataaaagttgcatatttttatcattattttagttaaatagttaacatttacatcaatcaagcagcatgtatttgcggtacactatttatttttgactatttattacccaacttgcaaagtcattatagcaatatgaccatttcaaggcaaggcaattcaaaccaaacgtttgcgtaccaaaaccctttgaaaaaacattgatattccatgattctgcccttctttccctggtttttcccgggcatttttttacgcaaacgtttgtgtattattttatagtattccatgtccattttttgtatactaaaggcaaatagattgaaacatttgccttcaatgccccgtaagaggagggtagacatgactttaaaagaaatcgcccgggaagcaggggtatccatctccaccgtttcccgggtcataaacaaaaacagcaccaatgttgccagcaaggaagtccaggaccgcatctgggagattgtccgccgtaccggatatactcccaacgccacggcccgcagtctgaaaacaggagcagctaaagccgcagactcccccacccgctccattgcctgcctttacgccagggccgaagattccaactcagacctgtttttctccacgctggcacgcagcatcgaaaaggaagccttcaaacacaactacgtgttaaagtactcctttaccggcattgacattcaccaccccaatacgttccgcctcataacggataaccatgtggacggcgtggtggttcttggccggtgcgataaacagaccctgagctttttaaagaaatactttaactgcgtggcctatacagggctcaacctgttggaagccaagtacgaccaggtgatctgcgacgggtaccaggccagcctggccgccatgaataccctccttggactgggccatacgagaatcggcttcataggggaaacacagtttgaggataggtacacaggctactgcgctgcccttagcgcccataatctgaggccggccaagtcctacatcgtcaacgttcccctgtcctccgagggaggatacaagggggccaaggagcttctgtcccgcaaaaccgacgtgtccgccgtattctgctgcaatgacaacacagccataggcgccatgagggccatcaaggaagccggtctggtgattccggacgacctctccgtcatcagcatcgacgacatagacacagcccagtatctgtcccccatgctcaccacaatccacatacccgtggaagagatgggacagatgacagcaaaaatcctcattgaccggattgaggaaggccacaagcttcctatcaagatgaaccttcccttctatctggcaaacagggaaagctgtgccccctacgccgaaaagacgcagggcccggaacatgaacatacaatgccaagaaaagaggactaaaccatgcttattacacttacggattccaaaacaactgctgtcattgactccacgggcgcccagctcatttccctgaaggatgcttccggctgtgaatacatctggcagcgtgacgcgaaatactggaaaaaatgctcccctctcctgtttcccgtagtaggcaactgccggaatgacaggactatactggaggaccgcatatacgccattgaaaagcacggattctgccgtgaaagggactttgatgtgtcacagaagtccccagcaaaggccgtattttccatggatgacacaccggacacacacagggcatacccttacgccttttgcctctccctggcatatgagctgaaggacggcattctgtttatggaatatcaggtggaaaacagagaccagcgcgacatgtggtatgccatcggcgcacacccgggatttaactgtcccatggaggaaggctttgcctttgaggattaccagctggtatttgaaaaggaagaaaacaccgtcagcatcccttacgatttggagcagctgcacttttctccctccaaaccgggaaccaggctgaggggccgtaccctttcgctgaagcgcgaaatgtttaaaaatgatgccgtattctttgacaagctgaattcccgggcggtatccatcctcaatcctgccaccggccacggcgtggaggtggggtttcccggctttgaaaccgttgctttctggaccttatatccggagccggccccatacctctgcgtagagccctggaacggctccggcatctatgagaatgaggacgaccagctctcccataggcaccacatacagcgtctctgtccaggggacagctgcagctatatcatgaccatacgaatcctgggataaattttctccaaattaaataatcatactataaaaccggctctgcagtccatttccctaagtgcagagccggttttatcctttgaattgcgtacgtgccctattccgtagataccccttctgaaactaagcagtttctccgtcatcccacaagcagaatttttaaaaattccacaatggacacagcacctgcgtatgctgtcatatgcagggagcgcagctgtcataagagatggatttaaacccttacttttgctatactcagttatatcataccgccctttatcccccactatttaacctgcgaatttccccggctaatcattcgacatttagcgacataatttatcgttttttgtcgtcctgtctaacttgataaaacccccatacccggtttaactttacaggagtcaaacgatatctggaggaatcatcatgaaatacgaaagagaaacctgcaacctgctccggcgcctcggcgtcaacaactcctacgtggggttccgctacacagtttatggtgtcatccgcgctattgccaatccggaactgcttatctacatttccaaagggctttacgtggaaatattcgcggaatatcatacatccattggctgtgtggaacgcaatatccgcaccatcatcagcaccatatggctgcatggagaccgtactcttctgaatcaggtcttcggctttgagttggaacagaagcctcgaaacggcgccttcattgatgcgctctctcactatgttgtagaacactattacgactgattctgtaaaatatatttagggtatccgtctgcttattctaagggcataattttacaaaatcataaaaagagaagggaggccaggcccggtgaccatcgggtctgtttgctgcgctcctatatagtgtctttttagaaataaaaaaagccctgcaaacacaggactcttacgtatgcggctaacaggactcgaacctgcacggtttcccaatgggacctaaacccatcgtgtctgccaattccaccacagccgcaaatataaaaaaatgcgggtggccggacttgaaccggcacggtatcgctaccgagggattttaagtcccttgtgtctgcctattccaccacacccgcagattgttacatgacacagctatatgcagatataaaacaaatggggcctacagggctcgaacctgtgaccctctgcttgtaaggcagatgctctcccagctgagctaagaccccaaattgcatatgttgtatcgcattataaaatgcaaacgacccggaacgggttcgaaccgtcgacctccgccgtgacagggcggcgctctaaccagctgagccaccgggccattatttagataatatagttctcattctgctttagttaggaagagtggaccttcggggactcgaacccaggaccgaccggttatgagccggttgctctaaccaactgagctaaaggtccgaactatataatctctaacattgtttactgttttacagtaaaagccgatgatcggactcgaaccgataacctgctgattacaaatcagctgctctgccaattgagccacatcggcgtatcataaactggtcaaatgaccccaacgagattcgaactcgtgttaccgccgtgaaagggcgatgtcttaaccgcttgaccatggggcctgaataaggtagtggtcgccatggacttccactaaaactccccgagtaggacttgaacctacgacagcgcggttaacagccgcgtgctctaccgactgagctatcgaggaataaaatgatacgcttattgcactttgcgctgactaaatcattatacaataactttgccaaaatttcaagcacaattataactttttacgtaccctcaaaaccacatattgaattccgattgtttacaaacctttttcccttaaccttctggataagccctcgaccg

SEQ ID NO: 3398 - DNA, 260 bp, Unknown
  gut microbiota DNA sequence
aaaaaatgcaaaaaaactattgataattttccttatccgaagtataatcaactcgtaatgcaaaaaaggaatttcaaaaagtatttcaaaaagaaaaaggagagtgcattaattatgagaaagcagacaaagttagttgctgtattatcaacagcagcactgctcgctattggtgcatccatgacttctttcgcagctacaggatgggctgaggaagacggtacttgggtatattacaacagagacggcgagagagcaac

SEQ ID NO: 3399 - DNA, 263 bp, Unknown
  gut microbiota DNA sequence
cataatcgcagacaggctccacacagtttattccgtatctggcaaccattttcacaatggcgcttcccacgataaccccgtctgcctgtgaggccatcctgctggcctgttccggagtggagataccgaatcctatggcacatggcacatccctgccctgctttacggtgtccaccatttccttaatattggtggtaatctcgcttcggacgccagtgactccaagagatgatacacagtacacaaatccgtcggattccctg

SEQ ID NO: 3400 - DNA, 208 bp, Unknown
  gut microbiota DNA sequence
cttccgtgaggccgacgacctgggggacggggagctcattgaccgcatcaaagacagcgcaaaacaaaaagggaccggaagatgggccagcatagaagccctgaagcaaggcgtggatatctccatgatcacttctgcctgcacggcccgtattatgtccaatcatctggatgaacgtgaaaaggcatggcagcttatccattcaccg

SEQ ID NO: 3401 - DNA, 70999 bp, Unknown
  gut microbiota DNA sequence
agcaggtcacatgagtgggtggaggaagtggatgagaccacggtaagagtggggcttacggactttgcacagcatgagctgggagatttggtttttgtgaacttacctgaggtgggggatacggttactgtgaaagaggcgtttgcggacgtggagagtgtaaaggcagtttccgacgtgtacagtcctgttacaggcgttatatccgcagtgaacgaggatatcctggacagcccggagatgattaatgaggccccatatgaggcatggcttatagaggtaaaggaagtatctgaaagagaagaattagtggacagcgcagcatatgagaagatatgtgaagaggagggctaaggcatgggaaaatatgttccatctacctctgaggaacagcaggagatgctgaaggccgtgggagtcagctcttttgacgagctgtacacagtagtaccatccggcatgaaggttgacaggcttgccataccggaggggaagtcggagctggaggtcagcggaatcgtcagggccatggcagctaagaataaggtatacagctccattttccgcggggcaggcgcctataaccattatataccatccattgtaaagagcattacaggcaaagaagaattcctgacggcatataccccttatcaggcggaaatcagccagggaatccttcagtccatctttgaataccagaccatgatttgtgaactcaccgatatggatgtatccaatgcctctgtttatgacggcgcgtccgcagccgcagaggccatggccatgtgccataaccgcaagaaaaagaaaacggtgatatccggggcagtcaatcccatgaccatacagaccatacagacatactgcgaaggaaacaacacagaggctgtggtggttccggccaaggacggaaagaccgaccttaaagccctgatggaggccatggaccagaccacctcaggcgtgttcatccagcagcccagctatttcggacagattgaggatgcggctgccattggtgaggcggtacatgccgcaggcgccaaatttgtgatgggcatataccccattgcgggcgccgcccttaaatcgccaagggagtgcggcgctgatgtggtcactggtgaaggccagcccctgggtatgtctctggcattcggcggcccttatctgggatttatggcttgtacccatgacatgatgcgccagcttcccggacgtattgtgggcgagacaaaggatgtggacggaaggcgggcgtatgtgctgacgcttcaggcaagggagcagcatatacgaagggaaaaggcatcctccaacatctgttccaaccaggccctctgcgccatgacggcagcggtttacatggcatccatgggaacgaccggcgtcagccaggtggcttccctgtgctattccaaggcgcactatgcagcggcagaaatcagtaggattccgggatttgagctggtaaaccaaggggatttcttcaatgaattcgtcacaaagattccctgcgatgcagatatgctgcttaagaaactgagcgaccatgatatattgggcggatacccagtagagggaggcatactctggtgtgtcaccgagatgaattccaaggcgcagattgatgctctggcagattgtttgaaggaggtgcgtgcataatggaactgatttttgagaaaagcagagtggggcatggatgctcactgcttccggcctgcgatgtacctgttgcagagattccggcccgggaggccagaaaaaaggctcctagatttccgcagatggctgaaattgatatctccagacattatacagaactgatgaaacgtacacatggtgtaaatgacggattttatcctctgggctcctgtaccatgaaatataatccaaagctgaatgaagagatggcagcccttcctggctttacaggcgtccatcccctgcagccggaagaaacagtccagggatgcctggaagtgctggtaaaggcagaggaactgctctgtgagattacaggcatggaccagatgacattccagcccgcggcaggcgcccacggcgaatataccgggttgctgctgattaaggcataccacaaagccaggggggatatgaaacgcaccaaaatcattgtaccggatactgcccacggaaccaaccctgcttcttgtaccatggcgggatttaccgtaatcagcattccgtccaatgatgagggctgtgtggaccttgataagctgagggaggttgtgggagatgatacggctggacttatgcttaccaatccaaacacagtgggtatatttgaccgcaatatactggaaatcacaaaaatcatccatgaggcaggaggactgaactactatgacggggcaaacctgaatgccgtcatgggaatcgcccgtccgggcgatatgggatttgacgtgattcatctgaacctgcataagaccttctccacgcctcacggaggcggcgggcctggttcaggcgctgtcgggtgcaaggatatactggctccgttccttcccaagtatcatgcggtgaaatccgaaaagggctatgcatttgagaacccggcccaaaccattggttccgtaaaggagttttacggtaacttcctggtggtagtgcgcgccctgagctacatattggtcctgggcaatgagggtataccggaagcagccgaaaatgcagtgctcaacgccaattacatgcgtgtgaagctgcaggacacctttgatattgcattcaacaatatctgtatgcatgagtttgttatgagcatgaccaggctcaagaaattgaatggggtttctgctcttgattttgcaaagggactgctggaccatggagtccatccgccgaccatgtacttcccgctgattgtggatgaggctttgatggtggagcccacggagacagagtctaaggagactctggacaacgtagtggatattttcaaggagatttataaaaattccgtggagaatccggaagccatgcatgaagctccccactccacgccggtacgccggctggatgaggttggcgctgcgcgcaatccggtgctaaaatattccggctggaagtagagagaaaagcagagggttaaacacctggcatacatgtaagaatgcgcctggggcgctgacagccgtagtccgctacgtctggtgtcccaggcatgttttatataaggagaagagtaaaatgggtgagagatatgaattaattgtgctgggagctggcccgggcggctatgttgcggccatcaaggcagcacagatggggcacagggtggctgtggtggaaagccgggatgtgggcggaacctgcctgaaccggggatgcatccccacaaaaaccctggtacatgcggcagaggtgctggaggagattcgttcctgtgagaagctgggcattcatgtagggcaggtatcctatgactttgccgggatgcatgagcgcaaggcagaggtggtggaacagctgcgaggaggaatcgagggcctgtttaaggcctataagatagacttaatcaggggatgcggcattatactggattccaacagaatacaggtgggggaccaggcttacgagacagacaggattctcattgcaactggttccaagcctgccatgcccccaattccaggactgactcttccgggagtggtgaccagcgatgaaatgctggaggggaaaggtgtttactgtaaaaaactggtaatcataggcggaggcgtgattggcgtggagtttgcaaccatttaccatgctctgggatgcgaggttacaatcattgaggccctggaccgtatcctgcccaccctggaccgggaggtttcacagaacctgaccatgattcttaaaaaaagaggaatcaaggtgtatacaggcgcacgggtggaccgggtagagcatacagaccagtcagtacagacagcgcaggagaaggggctggcggtgtattttatgtctaaggaaaaagaacagtgtgtagagactgagcgggtcctggtttccattggccgcagggccaatacagagggaatctgtcctccttcattaaatttgcagatgcagagaggaatgattccggtggatgactcttttgaaacctgcattaaggggatctatgccattggtgatattgttctgggaggcatacagctggcccatgtggcttccgcccaggcagtcaacgcggtgtgctccatgtttggggaaagggcacccatgaatctttcctgtatcccgtcctgcatttacaccaatccggaaattgcagcggtgggtatgacggctgatgaggccaagatgcggggaatcaggaccatcacaggcaaggccatcatgtcgtccaatggaaagactgtgattgaaatggcggacaggggttttgtaaagctggtctttgaggaagaaagcaaggtgcttctgggggcggtgcttatgtgctccagggcaacagacatgattaccggactgagcgacggggttgcgggtaagctgaccatgagtcagctggctgccacggtccggccccatcccaccttcagcgaggcaataggtgaagccattgaggatgcagacggcggtgcaattcatgctgcgcccagaagaaaatagaggaggaagataaaatgggatataagagtgatattgagattgcacaggaagcaaaggcaagaccaatcaacgagattgcaggcgcactggggattccggaaaaatatattgaaaattacggaccatacaaggctaaaattgactaccgctattacaacgatgcattaaaggacagacctgatgcaaagctggtgctggtgacagccatcaaccccacacccgcaggtgagggcaagacaaccgtgaccatcggtctggcagacgccctgaaccgcttgaataagaaggccatgattgccatgagagaaccttccctgggacctgtttttggagttaagggcggggctgccggcggaggatatgcgcaggttgttcctatggaggatatcaaccttcattttacaggcgacctccacgccatcggagctgccaacaacctgctggcggctatgcttgacaaccatatccaccagggaaacgccctgcgcatcgataccaagcgcattaccttcagaagggcggtggacatgaacgaccgccagcttcggaatattgtggacggattagggggaaagccggacggtacaatccgtcaggatggatttgatatcacggtggcttctgaggtaatggccgtattctgccttgcaaacgacatcatggacttgaaggaacgcctggccaggattatagtagcctatgacctggacggccagccggtaaccgccggacagttaaaggcccagggcgccatggcagcccttttaaaggacgccttgaagccgaacctggtgcagtccttggagggaacccctgcctttgtgcacggcggcccctttgccaatattgcccacggatgcaacagcgttattgccacaaagatgggctgtaaattagcggattatatggtgactgaggcaggattcggagcagacctgggggcggagaaatttgtggatatcaagtgccgcatgtccgggctgcgtccaaatgcagttgttctggtggccacaatacgcgctttaaaatataacggcggagtacctaaggcagaactgaataatgagaatctggaagccctgaataagggaattcccaacctgttaaagcatattgagaatatcactaccgtataccatctgccggcagtggtcgctattaataaattcccgtccgacacagcggccgagttggagctggttgagaacaagtgcagggagctgggagtcaatgtggccctgaccgatgtatggggcagaggcggagcaggcggggaagccctggcaaaggaagtaatccggttgtctgaaggcaggagcaccatggaatttgtgtatgacaccaatctgcctatcaaggagaagatagaggcaattgcagccagggtgtacggtgcggacggggtggagtttgctccaaaggcattaaaggaaatgaagaatctggagagcctgggatatggaaatctgcctgtctgtatggctaagacacagtattcccttacggataatgccaagcttcttggcaggccccggggctttaaaatatccattagggacatcactgcatctgtgggagccggattcctggtggccctggcaggtgatattatgaaaatgccgggacttccaaaggtgcctgcggctgaaaaaatcgatgtggatgaaaatggatctatctcaggattattctaaaatggagaatgacgatatgatgctggataagaaggtaacggagtttctggatgtactgtcaagcaatgagcctgttccgggcggcggaggggcatcggccacagtgggggccatgggggtcgcccttggaattatggttggcaacttgacgctgggcaagaggaagtatgcggatgtggagccggatataaaggaactgattgaaaagtcacagagtctcatggatgagttaaagcatttgacagacgaggacgcaagggtgtttgagcctctatccagggcctatggattacccaggggaacagaggaagaaaaagccgccagagaggctgtcatggaacatgcgctgttggaagccagtctggttccactgcagattgtggaaaaggcgtatgagtcactgacccttttagaggagctgggagaaaaggggacccggattgctttaagcgacgtgggagtaggcgcattgtttgccagagctgccctggagggggcatccctgaacatttttatcaacacaaagctgatgaaggaccggacccaggcagaggatttgaatgccaggacagaggaactcatagacaagggcagggcgctgtccgacaaggtgtacggcgctgtgcttaaacacatcaagtagcagggaggatgcaatgacaaagacgaaacatatggtatggatgggtatcctgattgctgtatccattgtattgtcaagatttctatccttttcagcatggaatgttaaaattggttttgcatttatacccatagttattggcgcggttctcttcggacctgtgcagggaggcatagcagcagcggctgcagattttctgggggccatactgtttcccataggaatgtattttccgggttttacagtaactgcatttttaaccggactaacctatggaatcctgctgcataaaaacaggtctatgtttcggattgcatgcgccgtgctgattgtacagctggtctacgggcttctgcttaatacctgctggatttcactgctgtacggggcaccctacctggcccttttgtccaccagaatcgtccagtacgtggttctgataccggtgcagtttgtaatcattgcaaggatgtatgtcctgggcagcaagaaataccatatacttcaggaaaactcataaaaatgatttcgggagggggaaagatattcccctcctgattcatcatatacctgcattgccagaaaggagattggatattatgaaagagataaagggttcagatgtggccagacagatgaaggagcagatgacggtccagatagaggaattgaaaggatatattccccatctggcaattatccgggtgggagaacgcccggacgatatctcttatgagaaaggggccacaaaacgtgcccagagattgggactgcgctgcacatcctttttgtttcctgctgaaatcagtcatgaccagtttgtggaggagttccagaaaatcaaccggaatccggatgtggacggaatcctcatgctgaggccacttccaaagcagattgacgagaaggaaatcgagagcctgattgatgttaaaaaggatattgactgcatcagtcccataaatctggcaaaggtttttgccggtgattcggatgcatatgcgccctgtacggccgaggcagtaatggagatgcttgcatatgagggaattgagctgaagggcaagcgtgtgactgtggtgggaagaagcctggtggtgggaaaacccttggcaatgctgatgctgggacagcacgcgaccgtaaccatatgccacacaaggaccgcggactttacagggacctgccggaatgcggagattctggtggctgcagcgggtaaggcccgcatgattaaggcggagcatgtggcagagggggctgtggtcattgatgtgggaattaacgtggatgaggacggaagcctgtgcggcgatgtggattttgaccaggtgaagacaaaggcaggagtgctgacgccagtgccgggaggcgtgggaagcgttaccacactggtgctgctaaaacacctgattcgatctgcaaaagaaaagattggataagccatgggggaacatgtaaaaacatttttagatgcttttttggcaggaatcgtcattggtataggcggggtggtttacctgggtgtagagaaccggattgcaggctcccttctgtttactgtgggcctttatgccattgtgctgaatcagtttgctctctatacgggtaaaataggatacgcactggggcgtccactggcatatatggctgagatgggagttgtctggtttgggaatctgtgcggaacctttaccaccggcaccctggtatcctttaccaggcttaagacagcccgggccgccgctgggatatgcgccgtgaaactggaggacagtctgtcaggcatattgatactggcctttttctgcgggatgctgatgtacattgctgtggacggatacaagtcaaaggggaatccggttatcctgtttttgggagtcagcgtgttcatactggctggatttgaacattgtattgccaatatgttttattttaccgtggcaggtgtgtggtcccttaaagcactggtctatattctggttatgacactgggaaacagcgcaggaggaatgttcataccatttattcggaaagtgggtcagaggacataaacacacgaatggcagacgacctcccctggtcaggaatacgaaaccaggggaggtctttgctttgttatgtcaattattcaggcatcagctgtcttcttgagacaggacatgatgtgttcgcagaccataaccagctgcccgttctggttgaagatttccaaagcctctgttataaagcctctgtcaggatgctttggattttcgcgtttttcttttaaggtaactttcacatggatggtatcccctatgaaaaccggatggataaagcgcatatggtcatatccataggaaaaagcagccggattaatcaggttggcagtcatgcccactgcaatggagaaggtgagtgtgccgtgggcgatacgttttccgaattcagtggtttttgcaaattccgcatccatatggtggggaaagaagtctcctgtctgaccggcatgaaggacaatgtccgtttctgtaatggtgcgtccaatggattcgcggacgcttcctatttcatattcttcaaaataaatagtctgttccatgttgattctccttgtaatatatatattgattgttatgctgtcctatagcaggggcagcttttgcgcttttataatgttccctgtcaatggtaattgggcaccgggtggtggcaaactctgttccgccaggggtgcggacagtctgaagcatatctaattccttaaaaccgtctgttttaaataacttatcccaggtatatacatccgcgcaccatacatcggcgggctccagctttgacagccagtattctgtggttcgggttttcaggtggtcagctagcagcgactttatctcatcccgcctggtacaccatgtttcagagtccgtgtaccctaagagggaatcacagcttataagtttccccagcacaggcacgggtaccatggcaatggcaaggtagccgtcaagggtctggtatatgccgtaaggcgcattgatatagccatttgcgttattgactgcagaacgctcaggcgactgcccgccgtcattcagataggtggtaaagacttcaaactgcatatccatcacggactccagcatgctgacatgtacataagagccttcaccgcaggaagcccgttttatgagtgcggccaggatgccttgggccaggtgctggccggcgaacaaatccgccacggaaagtcccatgggagtcgggggctgattctggttcccattgagccaggccaggccggacagggactggaccaacaaatcctggccaggcatagggctccatggacccttttttccataacctgtaatctcaccataaatcatggacggacagtgctgctttacagaagcgtaatccagtcccagcttttccaccactccgggacggaaattcacgaccatgacatctgccttcccaatcaatgaccatagtatatcccgggaagctggattttttaaatcaatggataccccgtacttgttgcggttgatggagtggaacagggaactgtcattctctattatcagattggacacatacagggtgcggcatatatcgcctccgtcaggacgctctaccttgatgacgcgggccccaaaatctgccagacgcagggtggcggaaggggcggataaaaactggctgaagtccagtatggtgataccttctaatggtttcatgcttcctctccctcctttaaatgaaattcttcgatgatttccagtgtatgttcgcccagcagaggcgcatgggtttcattttttatggggccatcaccaaaggagatgggacagcgggtggtaaatatgtcattgcctccgggccgcctgatgttgagaagcatatccagagtatggaactgttctgactggagcagctggtcccaggagtatacatcggagcaccagtacccgccggcattaagggctttaagccagctggccgtggtcctgtgtaagaggtgggagccaatgagctgtttaatctcatcccgctttgtgaaccattcttcctgattgtcgtaagaactgagggcagggcattcaataagccggcccaactcgggtatgcttcccatggccagggctatataaccgtcttctgtccggtagattccgtaaggggctcccagatatgcatgggcattgtggaaggcgctgcgcttgggaggcttatgtccatcatttaaaaaggtggttatgacttcaaactgcatatccagaatggattctaaaaggctgacctccaccaaacctcccaggcccgtgctgaaacggcggaacaggcaggccataatgccttccgccagatggatgccggtgtaggaatctgccagggagagggcaaacggcatgggcggctgtccgtcatcaccgttgagccatgccagcccggaaatggattgaaccagaaggtcctgtcccggttttttgttccatgggccggtggctccataaccggtaacggttccgtacaccatgcgggggttgatggatttgactgtctcatagtccagtcctatttttttcatgacgccgggacggaaattttcaatcattacatcagaacgccggattagtttttttaccatattcatgtcctccggcgattttaaatcagcacagaaactttgtttattccggtttatggtctggaacaggacgctgtcccccatgctgtccagattgtgcagcttcatctgtctggagccgtctccgctccccggtcgttcaattttgatgacacgggcccccatatcggcaagcctgagggctgcggaggggccggccagatactggctaaagtccaggacaatcatattttccaaaggtttcatttggattcctccctggattttctgtagagctggttcagctggtcaagcacatgggccggactgcctccgttcataatgtaatcctgtatatagtctccggcatggtcctggaaatacaggtaaccgttgtaacggggacggagataggaatggtccagagtattcagggtatctttaaagaaattcatggtcatattgttgttgatttcgtctagccatgccttgcggtggccgggctgcccgccgttttctgtatacagggtggtctgaatcaggggagaggcagcatattccgcaaagcgcagtgccgtttccctattttcgcataggctggacacagccagtccggtaccccctaagacactgcgaagcatcctgccgcggtaggtaaccaaatccatggcctttagaggatggctgcagtagcctcttcgggaataattggtgtagccataggcgtaagggcagtaatacaaatcattatcctcagccagtgcttcatgtacctggattgggtcccactggaaaatagatttgctgcagtaggaagccagctgacgcatgtcctccaggatacttactcccaggcttgtctccacgattttgtcaggatcgtcaaagaaatgctcggtggatgtggcacagtacatatagaaatccatcaacaggtttaatgggatgccggcaaacgccacatgcccctttctggcaaggtccattacatccttaaaatctgcgggaagaggatgttctccgtttctaaaataatcaggacggcagaccgcaacaggggtggcggcatcaatggccagtgcgctttggaaaccattgaaattataactcaggtgagacgcgcccacagagttggcaagctggtcatccagatattccttagacagatatttttctaaaggaagcagtattcctgtagtggccgcgaaaccggcccagggatggtcaatcacaagcaggtcgtaagactttgccagattttcaataggtgcgtcggcaaattcctgtaaagaacgtttttcccagtgaatggatacatccgggtgcagttcgcaaaaacgctgtgacaccgctgtgatggaagtgtaaccacggctgtgggaccaggtgattccatttaattgaatgctcataagatatgtacctccggtttgttgtgttgtggatatttgtctctgtagtttgatatgtatactgttgatgcggtactaccaataaacaataaatgaattaaaaaataaattgttggtactaccataaatgaattatagataggataaaaatgtttgacaatgttaatagtgcacaaaaaatacagaaattaactgttgaatatatgcattgacattacatataacttattttatgataatcacgaacggttcactggtagtaccgataaatttatcgataaaaatcaaggaaaagtatagaacgaaatatttgggaggtattaaaatggcttcagcattttttgtactgtttttggcatgtatttttcaggggagctttggaatctgctttaagaagtatcaaccgttttcctgggaagcgttttgggttctgttttcttttatcggagtattgtgtatcccacatatttggtgtatggtggaggttcctcattatttaagctatataacagccacccctgttcccacgctgattgtgggcgccttatccggttttttctggggaatcagttctatatggtacagcaaagcgattgatatgattggcgtgtctcttgtaacaggcattaacctgggattatcaaaccttttagggagctttgttcccatgattatactgggaacctatccgccggcccgtgttcttgtggtccttctgttagggcagcttatacttttgggcggtgtgattgtcctgtcaaaggcgggctttatgaaaaatggaaataatgagggtactaaaacggcaaaagaaaaaggaacgtcgtccttatttattaccgggcttatcatggcgcttgcctccggcgccggttcagcagccattaatatcggcgccacagcagccaattatccggttgccctggctgtgaaagagggggtaaacccaaccagcgcaagccttctgtcctgggtagtggtatttgcgggaggattcctggcaaactttgtttatgccatatcaaaactgattaagaacaagacttatacggattatacaaaacccggctgcgcaaaagcatactttaaggttgtgctgacgtcaattgtatggttcagtgcgctggctatctatggtaaggcgacagccctattaggtacccttggtccggtggtgggctgggttgcgttcaatggactggctctcatcattgccaatgcatgggggttcctggatggagaatggaaaggatttgaaaaggccaaacgtgtggccatatatggaaatgcagttatcatagccgctttggtggtggttggcatatccaatggtttataaaaaggaataagcagtaaatacttaaaatcaagaaaaccatccgcctgtccgggagtacttctaaaggaaagggaggcgtggtacaataaaatctgagtatgatttgaggaggtattttaactatggcgaacaggattgaagaattaaattatgtaccggagatgcctgaaaaggcaaggaatatcgtgattgtcggggcaggaggaattgtatccggttcacatctccctgcttataagatggccgggtatccagtagtgggtatttatgacctggaccatgagaaggctgaaaaggcggcaaaggaatttgggattcccaatgcagtgccggagctggaacagttaatcgaactgggagtaagggaagacgcagtctttgatatagcggtacctgcctccaagactgccagtatcttaaggctgctgcccgacaatgctgctgtgcttatgcagaaacccatgggtgagagtatagagcaggccaaagaaatcctggatatctgccatgccaagaatctgactgcaggtgtgaatttccagctgcgtcaggcgccgtatatgattgccgcaaggaaactcatccaggatggcgtgattggagatattgtggacattgactggagggttgtggaacttcatccatggcacttgtggagtttcctgtttggcctggagcgtatggaaattaactatcacagcattcactacattgactgtatccgcagcttcgtgggaaatccaaaaggcgtgtattgcaaaactatgcagcatcccaagatgcaggctctttcacagacaaggactgccattatcatggattacggcgatacgctgcgtgtgaatcttcatattaaccataatcacgactatgcgccggattatcaggaaagtacaatgaagatagaaggtattaagggcgcaatccgcatacagctggggcttatattggactatccgacaggccgtcctgataaggtggagtatattacggaagacggcaagggctggagggaactggaggtaaagggaagctggttcaacgaggcatttattgggactatgggcggcctgatgaaaaaactggaggatccctcttatcactatatgaacagtgtagaggatgcctaccataccatgtgcgtggtggaggcctgctataaatccagcgaagccggagggctgaacgtggattatgcgcagtaggcgtatagattgacattataagcaaggaggagcaccatgagaatcattgatacccatctgcatatttggaataaggaagaattttcgctcccgtggctggatggagaaggggaagttctgaaccgtacatattcgctggaagactataaaaacgcactggagccggacaagggctatgaggttgaggcggctgtatatgttgaggtggactgcgcaagaagggataaggagaaggaaaatctctttattgccggatgctgcgccaatccgggccagctgtttgccggcgcatgtatatccggttatctcaacgaggaggggtttaaggggtatattgataaatatgcatccgaatatgtaaagggagtaagacaggtgctccatgtccctgaagccttgccgggaacatgcctgggacagctttttgttgaaaatgttcgttatctgggaaagaagggactggtgtttgaaggctgtgtacggaatgcagagctgggcgatttatatgaaacggcaaaagcctgcccggatacaaccattgtcctgaaccatatgggaattgtggacccggatattatttccgttcagacgccttcagaggaagaacagcagtataaggaacgctggatactgaatatcagaaagctggcatccctctccaatgtggtatgcaagatttccggactgaatccgaaaggggagtggtctgcggaaacattgaagccagcagttgacattgccctggattattttggagaagacagagtcatgtttgccagcaattatcctgtgtgcaacattgcaaccggcctgtccccttggattgaagcattgatgaaaattacagagggaagaggcagtgaattccagaataaactgttccgtgaaaacgctaaacggatatacggtttgtaaagaaaaggagagatacatatgtcagatgtaaaacgttatggaagtatttcaagattaacacctgaaaaggccgattactataagaaacttcatgcagcgccgtggaaacagattaatgacatgataaaggagtgcaatatccggaattactctatatattgccatggagagtacctattttcttattatgagtatactggagataattatgaggcggacatggccaagatggcagcggattccgagacacagcggtggtggggagagtgcgtgccgtgtatgaacccgctatcggcagacggtccatggatggatatgcaggaaatttatcatttagattagaggtcagacaaatatgaaaaaattatatgtggcatccatcacaccttttgatggaaataatcagataaatgattctgccatgagacagttatgggataggaatcttgcagagggggccgatggattttttattggaggaagctccggggaatgcttcctgctgtcaagggaagagcgggtacatacctttgaactggctggcgaatatacggataggacagagatgttcgcccatgtgggagctatcagcacggaagaggccatattctatgccagaaaagcaaaagaaatgggaatacagaacatcgcagcaactccgccattttactttggcttttccgacaaggaaatggcaggatattactacgacattgctgaggcagtggatatgccggtcctgtattataacattccttccagcacccacagggagctgaatccgtcccagccggatttggcagccctcctgaaatcaggagctgtgggagccatcaaacacaccaatctcaatctctatcaaatggagcggattcacgacgttaatccggatataaggtgctacggcggatttgaaaattgtatggttgccttcctggcctttgggtgtgacggcttcattggcagcaattttaattttatgttgcctcagtacaagaaggtgatggagctgtatctgtcccaccatgatgatgaggccagaattctgcagtccaaatccaactgtattttggatgcagtgcttaaaaacggtttatgcgcaagccttaaatacatagcatcttgtcagggaatccaggttggagaggtcagaaagccgatgtgtccgctgacggaaaatcagaaggcagagattgaccgggtaattgggatgtatatggaaatcaagtgataatgaaatggcagattattcggattggccctgcggtgcgcgctgcagggccatttttattccctggacatgaaaggataagctgtgctattatagtaagagtaatgaggttatggaaagggagagtatcaatatggaatgtgagccgttaaagaaagtcacattgacggaacagattatggaacagattgcggggatgattacgtccggccagctgaagccaggtgataagctcccaaacgagagggacctggcagaattgtttggtgttacgaggagccggatacgggaggcgttaagggccctttctcttgtgggaatgctgaccatcaaaccaggagacggcagtttcgtcagtgaggaaggaacaaaggttcccgaagagactgtcatgtggatgtattaccaggaaatgaacaagcatgatgaaatctatgctgccaggaatctgatcgagacggaagtgtatctgacctgttatgataaccgtacgcctgagattctggagaggctggatggattcagggacaggctgctggatgtggagacagaggaaattacagcagaggcgttttgtcagctgctgacagatatagatacatatgtgggtgatgtgtgtggcaacggtatatacgcaaggttgatgcagattatggtgctgatgagaaaagaatcggccatgaagatcctgtctctggcatcatccaaagagagcgctgtgttttaccgctgtaagatactgaattcgttccatcaggatgacaggaataaagtaaagaaatgcctgaatgatttctttaaatattcaatcagggaaatttccatacaagaataaacgagttataggatgataaagggtcagctgacggatagacagctgaccctttgggatatagtttaaaactatggataggcaaatgttttattttcaagcgatgcagggattttgggctgtataactgtaaatgccaggttttatgtctggatcgtacacataacattcattggaagaatgttataatgaatccatatggatacatctataaaggagggacatatggataaaacaatgtgtatcagtgcggacaaacggctgcaggaatttcttgaatcagtaccggaggatcattcccatcgcagaatggtgcagcaggaggtaaaatgcggatttggcctggacggcgtctgttgcaggctttgctccaacggaccctgccgtatatccaaagcaaggccaaagggggtatgcggagcggacagggacaccatagcggcaaggaatttcctgcgctcggtggccgctggttcaggctgctatattcatgtgatggagcaggccgccaaagaattgaagacggcagctctagccggaaggaagctaaagggagttgacgcgcttcaccgtttgtgcgatgagttggggattggtgaagcggatgattcccaaatggcgcttcgcctgtcagaggcagtgctggaggatctgcgcaggccatatgaggaacccatgcatctaacggaaaaactggcctatgctaagcggaccggggtgtggaaaaatgcggggcttcttccgggtggcgccaaggatgagatattcaacgcaatcgtgaaaacttccaccaatctgaattcagatccaatggacatgctgacccagtgtctgcggctgggaatctccaccggaatatacggacttgtgctggtcaaccgtctgaatgatatcctgatgggggagccggaattagggtttgatcccgtgggaatgcgggtgatagatcctgaatgcatcaatatcatggttacaggccaccagcactctatgttcggcagcctgaccgggatgatggagcatccggaaatcaaggagatggctgaccgggccggagccaggggtatacggattgtgggatgtacgtgtgtgggacaggacttccaggccagaagccgctgttatgagaaagtgttctgcgggcatgcgggcaataattacagcagtgaggctgttttgctgaccggatgcatcgatctggtggtatcggaatttaactgttcccttccagggatcgaaccgatctgtgaggaactttctatccccatgctctgtctggacgatgtggcaaagaaaaagggagccaggcacctgccctatcacccggaggaccgcgaagatgtaagcgtcaatgtaattgcagctgccattgcgtcctatgtaaggcgcagcagggcgggaaagcggcagaatcccatgcaggatcacggatgtaatgaggcggttacaggtgtgacggagagaaccctcaaaggagcgctggggggaagctttgccccgttgattgatctaatcgctgccggaagcatcaagggagtggcggctgttgtgggctgctccaacctgcgggccaagggccatgacgtatttacagtggaattggtgaaaaaactgattgccagagatatactggtggtgtctgccggatgtacctgcggaggccttgaaaactgcggtcttatgagccgggatgcggccggattggcgggaccgggcttgtcacaggtttgccgcagccttgggattccaccagtactcaatttcggcccctgccttgcaatcggccgtattgaagccgttgccggggagctggccggagcgttgggagtggatctgcccaaacttccggtggtggtttccgcaccccaatggctggaagaacaggcattggcggatggggcgtttgcactggccctgggctttcacttgcatctggggctggcgccatttgtgatgggaagccctgtaatattggatgtgctgtgtaatcagatggaaggaataacaggcggaaagctgatggtggagacagagattgatgcggcggccgaaaagatcgctgctgtcatatcagataagagaagggggctgggactgaatgagtgaacgttatcctaaaagtgttcctgtatccccggataaccctgcaattgaaaaggatgaggacatctgtgcgaattgcagccattgcttggccgtatgcgcagaagaaataggagtggcacagccgtgtaaagtcacgggagcggatgattttacatgtattcactgcggccagtgcgcggctgcctgcccggagcgggcaatccgcgcaaagagccagtggcgggaagctgccatggctgtaaatgaccagcaaaaaattgttatattttccacagcaccgtctgtgcgcgtggggctgggggaatgttttggcggaaagcccggagactttgtggaaagctatatggtttctgcgctcaggaagctgggagcggactttgtgctggatgtggcattttcagcggatctgaccattatggaggaggggacggagtttctcaaacgatttatagccgattcccatccattgccccagtttacaagctgctgtccggcatgggtaaaatatatagaaacatttcacccggaacggattccgtgcctgtccagtacaaaaagcccgatcagtatgcagggcgccctgattaagacatatttttctaaagaaaaggggattgacccgcggcggatcgtgaatatcgcggttgccccgtgcactgccaagaaatttgagatttcccgggaagaattgtgctctgcaggagcgtatctggggattccgggacttagggacaatgactatgtattgaccacaagggaactggcggagtggatacgggaagcaggtattggtttttatgatctgaccccatctgcctttgattcccttatgggagaaggcagcggggcaggggtgattttcggcaatacgggcggcgtgatggaggccgctctgcgcatggcatattcggttgtgaacgggattgaaccgcctgatctgctgatgcagtaccagccggtgagagggctggaacaggtgaaggaatctgtggtatctcttggcggccgcgatgtgcgtaccgcggttgtctacggcaccagggcggcggaacagctgattgcaacaggagctgtggatgactatgattttgtggaagtaatgacctgtcccggcgggtgtattggcggcggaggacagccggacaacggtatactccctgttccggaccagcttcggatggcgagaatccggtcactttatttggctgatcaagagagaagtttcagaaattcccttgaaaatcaggagattaaacatctatatgaaacatttatcggggaacctatgagtaaaatggcgcaattacttctgcacaccagttatcacagcagaaagcgcgggatttaaatatataggatgtgaaattatgaacaaacagagggggaacttttgttatgggagttattgatttaatcaagattcacgccatagtttataaaaacaattgtatttaagcatttcggctgtcttcaacggtagaacgattgacaccggcatgggcagccaatggaaagagagaccgggaggtcgttatctcaccccctgattctaagctgagcgtactggttaattcccgccaacaaagaactggcgattgcaagagaaaagcttgcgatcgtggagtctgtatcataaaaaatgatggccggtgtacaggtgatttagaaatttgtacgccagctttttttgtgctcaatttttcctgtatttagttgaaaatgtcttaaaagtaccattttttcgtatgaatagcataaggaaaaacagcctccgggatgataaaatctatataacataatacatttgggaaaggagggtaggggtacatagaagtggattgcccacgggcagataaaaagaagggagaatataggcatatgaatttgtttgcattagtagcatcatttggaggaggaatcataggtgcatatatgggagcgcttcccgcgtttatattgaccggcgtgatcgccattgcaggggctgtggcggctatggccggaggggcagacatgacggtgggattcattgcgttcggttcctatcttggcccgcatattgcgtttgccggcggcgtggcagcgtccgcatatgcaggtaagaccaagaaactgggaagcggaaccgatattctgtcctgccttaacgggctggcggatccggccacactgctggtaggcggcgtgttcggtgtgattggttttctgattcattatgtgatcggggcagttcttcacctaaacacagatcttcctggattcaccgttatcatatccgccgtcattgcgcgtctggtatttggctccagtggcctgataggaaaagccgctcccggtgagacgagagagtattttaccggcggaaagggaatgctttgtaatgtgattcttggtttgggtatcggaaccacaaccggatttgtgtatcaggcgctggtggacggtggggcatcggcggcatccattggtagttatccggttctctgctttggaatcgcagcggtatcccttatttttgcccagactgggtttgccatgccggcaacccaccacattgcgctgatctcagcactggcggccgttaccgcccagaaccctgttatgggtatcgtattcggtatattgacctcgctgttcggtgattttataggcaagacctttaacagctgctgcgacacccatatcgatcctcctgcatttaccatatttatatttacatttattgtaaatgtactgttcggaagcggattctttagcgtttaaagcagcagctccttgattttatcaagacggaacccggagatctcatggctgccgatcacggtcacaggaagtgcggtatagccgcggctgtccataaaagcctggccctgcatatcgctgtccagatcgatttcctcataggaaattccgttgtcggcaagaaattccttgacctggcggcagtaagaacagccgggaagggtataaattctcaccgttttgtcagaagcgaaggagtcgggaagagagggccggtcctctttcaggggctggctcccgatggtccagttggcaccacagagcgaaccggtctgaagcgcttttaagacccgcagaacctcctgggtgtttctgccgatgttgttgtcgtggatcacgctgtagcggatcgtctggtcaggatcaataataaacaggccgcgcagcgcaactccctggtcctccagaagtactccgtagtcagccgccatggacaaggtcttgtcggctcccaggggataaccaatgcggccaaggccgttgcggatccaagcctgatgcgtgtattcgctgtctgtgctgactgccagaagtttggcatccgcttcatcaaacagatacaggtcattgctaaacgtggtgatctcggtggggcagacgaaagtgaaatccatgggatagaagaacaggaccagccagtgccccttataggtatcaaggctcacatcaaagaaatcctctccatccccggagacagcctttaagtgaaagtcaggagctttttttccaatgattcggttcaattttgattcctcctttatttgcatgattgtttctgttataatgatatcacagataaagaagaaatacaccacattttcgtcactgcactaagctcgacaggacctcgccaagtgccagtgacatgtatcgcacttagagaccagaatacggtctctaagtgctcataactaggaggtaacagcatgagtgataagaagtactccggtaatttttataaaacggacaagatagaagaaactccagacgactgcccaaactgcctatatcagaacaagaaagcagagaaggacccggatgaatgccccaactgttattacattcccaacaaggagaagaaggaagggcaggagtaaccgtactcagtaaaagacagtaaaagacaggagacatccggaagattccggtgtctcctcagactgtagacaaagcccaaggctcacgcctcggatttttcgttaaaagagctataaatattcctgttttcaggattttatagctcttttctgatagaatggaagtatcaaaggaaggtgggatatttctatgatgactcaaaataaggacaagaaaagaggaaagattcagatattctgtatggatgacatggttccccaggatcatcttctgcgaatcattgataaagcgattgactggaacttcatctatggccttgtagtggacaagtacagtcctgataatggacgccccagtatggacccggtcatgttgataaagcttccattcatctagtacctgtatggtatcaaaagcatgcggcagaccgtaaaggaaatcgaagtaaatgtagcttatcgatggtttcttggacttgaaatgatggataaggtccctcatttctcaacgttcggaaaaaactatacccgccgttttaaggacactggcctttttgagcagatattttcccatatactgcaggaatgttataaatttaaactgatagacccaagtgaggtcttcgtggattctacccatgtaaaagccagggcaaacaataaaaagatgcagaagcggattgctcaggaggaggctttgttttttgaagatttgctaaagaaggaaatcaatgaagaccgtgaagcacatggtaaacggcctctgaaagaaaaggatgatgacagtaatccgccatccggcccatccggtggcaaagaagaaaagacgattaaaacaagtacttctgaccctgaaagtggatggttccacaaaggggaacataaaagtgtatttgcctatgcagtacagaccgcgtgtgataagaatggctgaatacttggttatagtgttcatccgggaaaccatcatgacagcagaacctttaagttcctgtatgacaagataaaagagattggaatcaagacgctgatagccgatgcaggatataaaacccccggtatagcaaaactcctgatagatgatgggatcaagccgcttttgccatacaagtgtcccatgaccaaaaaagggttcttcaagaaatatgagtacgtttatgatgagtattatgattgctatatctgtccaaacaatcaggtactgtcctatcgtacaaccaaccgtgatggatatcgtgaatataagagcagcggaacggtctgcgaaaactgtccatacctggagcagtgtacccaaagcaaggatcatgtaaaggttgttacacgccacatatgggagccatacctggaaacgtgtgaagatatccgtcatacgcttgggatgaaagagttatattcgcaaagaaaagaaaccattgaacgagtattcgcaagtgcaaaggagaatcatggattccggtatacacagatgtatggaaaagcccgaatggaaatgaaagccgggcttacatttgcctgcatgaatctcaaaaaactggcgaagattaaggcaaaatggggactcctggaagaaggggagccacacaaaatttctattttatacacaattcggataataagagaaaaatggctctgggatacaaatcccagagccgctttgtctacagtctgaggagacatccggaagattccggtgtctcctgttttttccgtattgtttgttttaatccagtgataacgcgtgtctggccacggtcatgtcctgttccacagtgccgccggatacgcccagaccgccgatacagcgtccgttcttcatgatggggattcctccgccgaagatacagaacttgccgggatgggtctgctggagcccgtataaggactgtcccggcaggatatccctggcggcttccccggttggcgcgcggagcgccgccgccgtgtacgctttcgagtaggagatggagatgctggccaggagggagtcatccatccggtgcatggcaactgtattgccaccctcatccaccactgtgataaccatgggtacatggatgatctctgccatttcttcgcctttttcaatcatctgcaaggcttcttttaaacataatccctgatgcttcagcgcgtccaaaagggcggctgttatttcttttgctgtatgtgtttcattcataatgttgtctcctttatcaaagcaggctgcggtacagttccttgtccggatgggcaatcacaaccttttcaagcagtgcgccgctgttttctgctgtctttgcacctgcctccacgctttcctccaccgcgcccacatcccctgtaaaggttacaaaggatttgcccccaatccctgttcccaggcggatttcgattagggatacattggccgccttggccgctgcatcggcggcgatgattgcgcctgtgacggagaaaaactccagaatgcccagcgcctttaggctggagggcatggaggacatgttgatggcctcaatcacctgcgggtttactctggggatgagaagccggtccaccacattggttttagcgctttcctcaccgatcctcaaagctgattccacggctgaaacttcccctgttattaaaatctgatacttgccgggacagctgggccttgcagagacaagcttgatttccgctgccttgagcatcatgtctgcggccaggattcctttggcaatgctgtttaattctaaaaaaccgatggtaatcatatgattttcctcctaactactgcctgtcagcagaaataacaatttcagtatcagtaacctgtacgacggttccggatatactcgcatgaatgttggcacccagcgcctccgcaggaatcgctccgatcagctgcccgcacgaaaccgtgtcacctgtctgtaccacaggttggctgggggcgccgatgtgctgtcttagggagatccgaactgtggcgggatcagcggctttgcagctgtcaatatgatagtcataatactggtcgacacccaggcggaccgccatgcgcttggacggcgctttccggtagcttcgttcctccagctgtgtaaatgtctctgaaggcttgggatagcggtatttattctgccggagcagattcttgacatagatattgacctggcgcggctgaagtcccatgggacaggcatatgtttcacagagtccgcactcgctgcatatcatggcctgcctgacatgctcgtcctccagaacctcctcgggagactgggcataggcgagctttcgcataatcatatgcggctttaacggatgtcccgtgaggtaacgcggacacatctgggtgcagtaagagcattggatacagcacattttggcccgcttcagcgaaacggatatgggaatattatgcttttccaccaggggcgtatcgtcagcgacaatgatgtagccggaagtggtttttgtgacggtcagtcccgcggcttcctcctttctgtagcatttacccatcatggggccgcctgcgattacgtgaaaggaggaaagactgcttcctccggccagcagaaggcactctgcaaaggaagtacccagaggagcgcggacaatgcagggggagttcaccgccccggtaaccgtcaggtatttttcggtaaagggctgtccctgggatgcattgtaaatggaataaacggtggccagattggataccacggcacccacgtcaagggggattccggaaggcggaaccgtgcgccccgtaacgtcgcagaccatgatctgttcatcgccggccgggtagaagttcttcatcttataaagcttgacaggactgtgaagttctgtaatggcagcttccagtgcggcaatctcttccgagtatgtttctttcagtgctatataacgtttacccgcctgtaccatatctccgatcataccggcggccgtgacgatctccctggccttatggagcataagaaaacggtcggtccgcaggagcggttcacattcggcggcattgataatcagatattccacggtacagttcagcttgacatgggtagggaagccggccccgccgcacccgacgattcccgcttcttttatttgttctaacagcgtcatatatactctcccttcatatatcactcaaatccctttctttttaattataaagaaaaaagatatcctatacaatgaatgggcagtctaaaaaatggtattatccaatactgtccgactcattgcgtacaagtctgtataatacaaaaaatcagtttgtctagtactaaaggaaacttttataaaatgttacaatataaaaataaaggcggaaaggtgatggtgataaatggaaataaaaaactggaatggaagccagggggacctgatgaggattatacaggaatcagtgcccggcaaacagattaccatggctcatataatagccagcccggatgaggtgatttacaaaaaactgggactggatccaaaggttgattatcaccgttcggccatcggagtactgacccttactcccagtgagacagcaatcataacagcggatctggccatcaaggcttctaatatacagattggttttatcgaccggttcagcggtacgctcattatcacgggaaccatttctgatgtcaatatcgcctttgagcggattttggagtacacgtcctcagaacttgattttacggtatgcaggatcacaaaggcctgattacatgctgcttagccgggaaggagcgtcaatgaaaaagatcatgctggtggggcgcagcggagcgggaaagaccacgctgacacaggcgatgaagggtagaaagataacataccataagacgcagtacattaataattacgatgttattatcgatacgcccggagagtatgcggagaacaaaaccctggcaagggcgttgattctgtattcctatgaggctgacattgtgggactgctgatgagcgccattgaggactattcactgtacagccccaatattgtatccatggcaaccagggaagtcatagggatcgtgacacagattgaccagccggaggcaaggccggacctagccaccatgtggctggaacttacgggatgcaagaagatattctatgtcagctccgtgaccggcgaaggggtgggagatattcttaattacctgcgggaagagggcgataccatgccatgggaaagagaggaggaaacggatgaagcgagttctgatgctggcgggcgactatacggaggattatgaggtgatggtgccgtatcaggcattactgatggcgggggtggcggtggatgtggtctgcccggacaagactgcgggagacaccataaggacagcgattcatgattttgaaggtgaccagacctattctgaaaaaccggggcacaattttgtgctcaatgcttcgttccagtatctgaagctggaacaatacgacggactgttccttaccgggggaagggcgcccgagtatctcaggctgaattccagggtaatagatatggtacattactttatggatctgaaaaaaccggtggcggccatatgccacggagtacagatcctgaccgcggccagagtgctgaagggaaaaaaggtgactgcttatccggcggtgcggccggaggtactggcagccggaggcattttcatggaaaaggagccgtatgaagcggtaatctttgaaaatctggtaacttccccggcctggcccgggaatgtggaaattctaaaagggtttctcaagctgctgggcgtcacaatttcgtgatgaaaagtctgtattttacatctattacgttttaataatatgtcttctttttcgtccgtataggatattatgaggaggagggacgccctggaattgatggacgggcaaatcccggaaactgaaaactatgcaatagaaaacaaaataaaggaggatatttgtatgatagcaaaggggtttacagagccaaccgagagagtgaaacgtcttaaaagagcaattgtcgatgcaattccgtacgttgagtctgagagggcggttctggtaacagagtcctataaagagacagagggactgtctcctattatgcgccgtgccaaagcagcagagaaaatttttaacaatcttccgattaccattcatgatgacgagctggttgtaggcgcaatcacaaagaatctgcgttcaacagagatttgtcctgaattttcttatgactgggttgagaaggaatttgagacaatgggcaccagagttgccgacccgttccagattccaaaagataccgcagcagagctgcatgaagcattcaaatactgggaaggaaagaccaccagcgctctggcagattcctatatgtcacaggagactaaggactgcatcgcaaacggagtgtttacggtaggcaactacttctacggcggcgttggacatgtgtgtgtagattacggcaaggttctggatatcggtttcaccggaatcattaaacaggtaatcgagaccatggaaaagctggatacaagtgatccggagtacatcaagaagaaaaatttctatgaggcgattgtaattacatatacggcagcaatcaactttgcacaccgctatgctgccaaggcaagagagatggcagcttcatgcccggatcctgtaagaaaagcagaactgctccagatcgctgccaactgcgacagggttccggaacggggagcaaccaatttctacgaagcatgccaggcattctggtttgtacagatcctccttcagatcgaggccaacggccactccatttcaccaggacgttttgaccagtacatgtatccgcatctggccgcagataaaaacatctgcccggaatttgcacaggaactggttgactgtatctgggttaaattaaatgatgtcaacaagacgcgtgatgaggtcagcgcacaggcatttgccggatacgcagtattccagaacctgatcgtgggcggccagacagaggacggcctggatgcaaccaatgacgtatcctatatgtgtatggaagctgttgcccacgtagctctgccggcgccttccttctccatccgcgttcaccagaatacaccggatgaattcctctacagagcatgcgaagtgacccgtctcggactgggcgttccggctatgtacaatgatgaagtaattatccctgcactgtgcaacagaggcgtgtctctagcagatgcaagaagctactgcatcatcggctgtgtagagccgcagtgcccgcacaagacagagggctggcatgacgcagcgttcttcaacattgcaaaggttctggaaatcaccctgaacaacggcaaggtgggcgacaagcagttaggcccgcagaccggtgatatgacttcctttaccagcattgaggatatttttgcggcatacaaaaaacagatggaatatttcgtatatcatctggcagaagccgacaactgtgttgacttcgcacatgcagagagagcgccgcttccattcctgtcagcactggtagatgactgtatcggaagaggcaagagtgtacaggaaggcggagcaatttacaactttacaggcccgcaggcattcggcgtggccgattccggagactccctgtgtgccatcaagaaacatgtatttgagagcaaggaagtaaccatggctcagctgaaagaagcaatggcaaacaacttcggttatgcatgcaatgcctccgcacctgctgctacggctgacgagtgcacggacgaagcaaggatttatgaagcagtcaagagaatccttagcaataacggctccatcaacctggcggatcttcaggcacagcttgccggacctgcacaggcatgccgctggccgtcacccgcagagccggccaagacagaaccggcctgtgtgaaccctgattatgcacacattaagagactgatggagaacaccccatggtttggaaatgatattgacgaagttgatatgatcgcaagacgctgtggacagatttattcctacgaagtggaaaaatacacgaatccgcgcggcggacagttccaggctggatgctatcctgtatctgccaatgtgttattcggaaaggatgtaagcgctcttccggatggaaggctggctaagactcctctggctgacggcgtttccccgagacagggaaaggataccaacggaccgacggcggcagccatgtccgtggcaaaactggatcatgcaaactattccaacggtacgttatacaaccagaaattccttcctgacgcacttgcaggggatgaaggcctgaaacgtttcgcatccgtggtacgcgcatattttgatcacaagggcatgcatgtgcagttcaacgttattgacagagcaaccctgcttgcagcacaggagcatccggaggattacaaggatctggtagtccgtgttgcaggatacagcgcacagtttaccgttctggcaaaagaagttcaggacgatattatcagccgtacagagcagaccttttagtgcggttccagtataatacagtgaagggagttcggcatggattcaatcaattataatttaatgggaaccgtgttcgacatacaaaggttttccctgcatgacggaccgggaatccggacgatcgtgtttttaaagggctgtcctctctcctgccagtggtgtagtaatcctgaatcccagagtatcaaaccagttattatgtataaagaagatgattgccttcattgcggccgttgtataacggcctgcaagagaggggcaatcagtccggaaaataaaacctggattaacagagagctgtgcagtggatgcggcgaatgtgtcaatgcatgtccggcaggcgccctggtgctgaaaggaaagacaatgtcgatccagcaggtaatccgggaactgaaaaaggatgccacaacctacagacgttccggcggaggcatcactttatccggcggtgagccgctgatgcagtatgaatttgcttccgagcttctgcaggcatgcaaggggcagggatggaataccgccattgagaccactggagtggggagccgtgaagcgattgagaaggtaattccttatgtggatacggtgcttctggatattaagcatatggacggtgagcagcataaaaagttcacgggggttagcaatgacctggttattaaaaatgctcccgagatctgtaaaatatccaatactgtaatccgtgttccggtgattccgggctttaactactcggtggaggatattaaggcgatcgcagagtttgccagaaccctggtgggtatacggactatacatctgctgccgtatcattcctttggcgaaaacaagtatggtttgttgggccaggattacacactgaaacaaattaagccgctggctccggaggatctggaggaatgtaaggcagtggtggagagttatggttttcaatgtatcattggcggttagacaagattttagaatggaggaagaaaaatggatcagcagttaattgagaaagtaatgaagcaggtttccgatgaacttggcatcgggaaagaggagtgcaaggcagaggcgccaaaggaagaatgctgcggtaatattggattaaccgagtttgtgggaacggcaatcggcgatacgatcggccttgttattgccagcgtggatcctatgttagtggacgttatgaagttaggtaaataccgttccatcggtattgtgggaggcagaaccggagcgggccctcagatatgggcagttgatgaggctgtaaaggcaaccaacacagaaatcatttccgtagagcttccaagagatacgaagggcggtgccggacacggcagcttgatctatattggagcagatgatgtatcggatgccagaagagcagttgagattgcccttcaggttcttccaaaatacttcggcgatgtatacggcaacgatgcgggacatctggagttccagtataccgcaagagccagttactgtcttgagaaggcgttgggtgcgccggttggaagagcattcggcatgacatgcgcgggaccggctgcaatcggcacggttctggcggatatcgcggtaaaggctgctaacgttgaagtggtaggctactgctcaccaggtaacggcggaaccagctattcaaacgaggttatcctcacatttaccggtgattccggcgctgtacgccaggcagtgaaggcttccatcgaagcgggcaagaaaatgcttggtgcattaggtgatgaacctaagtctacaacaactccatatatctaataagataaatctggagaatgtgaatcaattaaggaggttctaatatgaatgcagatgcattaggtatggtcgagacaaaaggattggtcggtgcaattgaagcagcggatgccatggttaaagctgccaacgttacactggttggatatgagaaaatcggatccggacttgttaccgttatggtaagaggcgatgtaggtgcggttaaagcagctaccgatgccggcgcagcttctgcggcagcagtgggagaggttgtatctacccacgttattccacgccctcatacggatgttgagaagattcttccacatcttgaataaaggcagcagatagaatcaattatctggcagcggttgcagcggggaatgcccctatccgttggataggggcattccttgaaacgaggtgaaggaattgaaaatcagcgaagaacagttgaaagagctggtgctgcgtgtactcggagagctggaggcagaaagaaaagcagacaacgcgaaccatcccggacagaagctttatatgctgtgcgtgtcgccatggagcgaccggtacatggaatttctaagggaaatggaaacgtcggatcaatatgagatcgtacctgtgattccttcctcgtggaaggacatgggatatgaagcaagactcatgaaaacgaaagcctgcagccacattctgcaccgctcctgtgaaaaacctgcggatctggaaacggcgattacagtgatgccggtggttccgagagatgttctcgtaaaaactgcattgtgtatcagcgatacatacgaaacctcctggatatcggaatgcatggataaggggagccgcgtagtgcttctgcgttctggccttgcgagattttccggaaaggaaaaacctgcttaccggaaccgggtcatgaattattacaggcagattctggagtatggagtcgagatatgcagcgtggatgaattcacaggcagagcgccctatgaatcccctggtcattctccggccggagagacggcatcgggaaatgatacgcagcatcctgatacaaagaaaaaaagggttatatcatcgtccaatgtggaacagtttgcatccggcggtgttatattccttcagcaaggcgatattgtaacggacctggctaaagacagggcgaagtttctgaatatcgtattcaaataaacaggagagcgaggtgataggatgaaacaggcgttgggattagttgaaatcagtggactgtccactgcggttgtggtggccgataccatggccaaagcagccaatgtacggatcctggagattgaaaacacaaaaggtcttggatatatgaccattaaaatcgtcggggatgtaggcgctgtcaatgctgctgtcaatgcaggaaagcagattggaaccgcaaacggaaagctggtttcatggaaggtcattccaaggccgtccgactatgtcgatcagacattttgttgtcctgagccaccagtaccgccttcccctcctaagaaagaagcacaggaggagacggaggctgaggttgaagtaaaggctgagacaatggaagcggttaaggcgggagaaccggaagagactgggctggaagaaatagcgccggaagatacggagcaggagactgaagcggaaccagcagaggccggaccggagccgaagattgaagcagagccgatagaaattaaatcggagcctctggttgaagcagaaccgaccaggaccgggaccgtagatccggcagaaccggaagtcccggattctccggaaacgccgcccgaaaggcccaaaaagacggctaaacgcacgacatctgcgaagagcaccagtactacaaggcacaaaaagaattaatggagaacaggagttccggtaagaaatatttaaacacgctcctgagacagccggattctccgtgaaaggaatgtgaagagtatgagattggctaagataataggcacagtagtagctaccaggaaggacaattcgctggttggctacaaactgatgattatcagacggattgatggacacggtaatttcattgattcagaggaagtggctgtggattatgtcggagccggaatcggtgagacggtcctgattggttcgggctcttctgtccgcgtggaccagtccaaacgggaggctgtcatcgatatggcgattatcggaattgtagatacaatggatatttagtgtaaaatgaattatttttaaggaaaggaggtaatgaatgacatgaaaagcagtatttactccagtgtgaccgatgcggtggctgctgcaaagggagcttacagcagatattcaaagctgactctgaatgaacggcaggaaattctggaaggagtgaaaaaagcacttcgtccgattgccaatgaactggcagccatgaccgtttcagaaacaggcatgggaaatgtctgtgataaggcacaaaaaataaagcttgccattgagaagacgcccggcgtggaggacctgataacagaagtgaatacaggtgaccacggtatgacgctctatgaactttccccttttggtattgtttgtgcggtacagccatgcaccaacccctgtgcgacactcatcagtaacaccattggaatgctggctgcaggcaatgcgatcatccattgcccacatccgagagcagtaaaagtttcacagtttttgacaacgattatcagtgagacgatccgcagcatcagcggtatagataacctggtagttacccttcacgtaagcctgatgggatttaccacagaggttatgagccacccggacgtggatttggttgtctgcacaggaggtagcggctcgctgcgccaggccatgacttccggcaaaaaggtaatcggagccggaccagccaatcctgtcgccatcgtggatgccacagcgaatttcgaaaaggctgcaagggacattgtccgtggagcttcttttgacaacaatctgatgtgtacgtcggaaaagtgtatggttgtggaagaaaaagcagcggatcgttttatatttgagcttctgaaaaatggagtttattatgtcaaaaatgaggaagagattcaaaaacttctggacgcggcagtcaccggggattttgtgattaacaaaaaactggaaggtcggagcgccaatgaaattcttgaatatgcaggtattccctgtaatggaaccatcaaactgatcgtagcagagacagagcggattcatccgttcgttacgctggagcttctgatgcctcttgtgcctcttgtgaaggcggctgactttgaggaagctctggagattgctttggatgtggaacaaggttataaacatacggcaaccattcattcagagtccatcgaacatttgaaccaggcggcaaaagaaatgcagacctctgtatttgtaaagaacggcccctcctttatgggaattggatttgacaaagaaggtcacaccagttttacaatcgcaacaacaacaggagaagggacgaccacagcaaggcatttcgcccgtagaagaagatgtacgttgacaagcggattttcgatccgctgattgcagtaagaaagcaggttgatggaatgatggaaggacgggatgacagattttattatgtgacatcggaatctgtaacagagggccatcctgacaaggtatgtgatcagatttcagacggtatattggatgcatatctgggaaaggatccaaaatccagggtggcgatcgaggctatggcatctgccaatacgctaatgctggcgggtgaggttacatcaagcggtcatgtagacgttgttgcaaaggccagagagattatcagaaacataggatacacggaacatggaaaagggtttgatgccgatacatgtatgatttttaccaatatacataaccagtcgccggatatttccatgggagttaccagaagcgccggaaccggcaaagaagttctgggcggaggagatcagggtatcatgtatggctatgctgtcaatgagacggaaagcctgatgccgctgtcctgtcatctggccaaccgcctggcggaacgtctggcttatgtgagaaaggttcagaaagcagactttctgtatcctgacggaaaaacccaggttacaatgaagtacaatgaggcgggaaagccggtttgcatccacagtattgttgtatccacacagcacagtgaaaatatttcacacaagttgctggaagcatttatacgctgtactgtcatagagcctgtgattgatccgcaatggatcacgccgaagacaaggatccatgtgaatcccacggggcgtttcgtcataggagggcctgccggggatacaggtgtcaccggaagaaaaatcatggtagacacctatggaactgtgggaaaacacggcggaggcgctttttcaggaaaagatccgaccaaggtggaccgttcggccgcttacatggcccgttatgtggccaagaatattgtagccgcggagctggcggaccgatgtgaggttgcactggcttatgtgatcggaggcattgaaccggaagcaattacagtcaatactttcggaaccggcaggataccggacagcagtattgaggagctggttaaatccgtgttttcctttggagtagctgattatatttcagaactgaacctgagaacgccacagtttttaaaaacagcagcatacggccatttcggaagagatgaccagggcttccgttgggaagagaccgacaaggcctggctgttgaaacagttagcattttaaattttactataataactaaaacatatcattcaggaggaaaaaaatatgtcaaacgaagcattaggaatggttgagaccaaaggtttggtaggagcaattgaggcggcagatgcaatgacaaaggctgctaatgtagcgctcatcggttatgagaagattggttccggacttgtaacagttatggtacgcggcgatgtaggcgcagtaaaggcttccgtggatgcaggcgcagccgctgcggccaatgtaggccaggtagtttcccagcatgtaattccaagaccacacacagacgtagagaaaatcttaccaaagtcattataatgtatcagtaagtatataccggccaatacggccggtttataaacttccgaaaggggttgaacatgatggtaaatgaagaactgctgaaactgattactgaacgggtaatggagaaagttgtaaactataatacttataaaatccctgtaggagtatccaatcggcacgttcatgtgactcgggaagatcttgagaccttgtttggaaaaggatatgaactaactgtaaaaggcgaattaaagcagccggggcagttcgccagtaacgagacagtggcgatccgtgggccaaaaggagagtttgaacgggtacgtatcctgggcccggtcagaaaacagagccagatcgagatatccaaaacggacagctttcggcttggagtgaaagcgctgatcagagaatcaggagatttgtcaggaacgcctggcctggagctagtgggaccaaagggaacggtcctgctgccgcagggagcgattgtcgcgcttcgccacattcatatgaccccacagcaggcggaggccatgggagtatgggataaggatatcgtggaagtggaaacattcggagagagacatggagtatttggagatgtattaatccgggtgtcggatcagtttgaattggagatgcatgtggatgtggatgaagccaatgcatgtgcgctgaaaaacaatgattatgtaatcatccggcattaaattaaagagatagaaaagaggggttatatgctcatgaccaaagaagtgctgtctgaatttgcagaactgattagggaaaacaagtgcaatccttattcagggaacctaaagacgggcgtggatttgggaacagccaatattgtgattgctgtcacagacgaagataaccatcccgttgcaggtgcgactgcggtttccaaagtggtaaaggacggcattgtggtggatttcgtcggcgcgatgcagacggtccgcagactgaaagctcagctggaagaactgcttggagtaacattggagacagcggccaccgcggttcctccgggtattatggatgggaatgtgaaatgcatttccaatgtggtggaaggcgcaggatttgaagtgatcaatgtgatcgatgaaccgactgcggcagcttccgttttggagatcacagacggcgcggttgtggatgtgggcggcggaaccaccggaatcagtatactgaaagatggaaaggtaatttttaccgctgatgagccaaccggaggaacccatatgactctggtcctggccggatattatggaatcccgatcgaagaagcagaaaagctgaaaaaggataaggacaaggaaaatgatgtgtttcctattataaaaccggtggtagagaaaatggcttcgattgtaaagcgattcctttccggttatgatgtggactgcgtctatgtagtaggcggagccagttgttttgacgagtttgaacagacatttgagaaggcattagggataacaactgttaagacaaatgatgcgctccttgttacccctcttggcattgcatggaatgccgctgccgactgcgcataaatgaaagaaggtgtgatacgcttggatatggatataaaagtaattgaacagctggtagaacaggctttaaaagagattaaggcagagcagcctctgaagtttacagcacccaaattagaacggtacggtgtgtttaagacaatggatgaggccattgccgcttctgaagaggcccagaaaaagctgttgttctcaaaaatttcagacagacaaaaatatgtggatgtgatccggtcaaccataatcaagagagagaatcttgagctgatttccaggctgtctgtggaagaaaccgagattggtgactatgaacacaaattaatcaaaaaccgcctggctgccgagaaaacacccggtacagaggatttgctgaccgaggccattaccggtgacaacggtctgaccttagtggaatactgcccatttggggtaatcggtgctattacgcctaccaccaatcccaccgagacaatcatcaacaattccatttcaatgattgccggcggcaatacggttgttttcagccctcatcccagagccaaaaaagtttcacagatgacggtgaaaatgttgaacaaggcgctgattgacaacggcgcaccgccaaacctgattaccatggtggaagaaccgtccattgaaaataccaataagatgatcgacaacccaagtgtccgcctcctggtagccacaggaggaccttctattgtaaagaaagtcctttcctccggcaaaaaggcgattggcgcaggggcaggcaatcctccggtagtggtcgatgagacggctgacattgacaaagcggcaaaggatattgtggatggatgcagctttgacaataacgttccatgtatcgcggagaaggaagtgtttgcagtagactcgatctgcgattatctgatccaccacatgaaagaaaacggcgcgtaccagatcacggatccaatgctgttagagcagctggtagcgcttgttactacggaaaaaggcggtcccaagacatcctttgtaggaaagagcgcccgctatatcctggataagctgggtattacagtggatgccagcgtgagggtgatcatcatggaagtccccaaggatcatttgcttgttcaggaggaaatgatgatgccgattctccctgttgtacgtgtatccgatgtggatacagccattgaatatgcccatcaggcggagcatggaaaccgccatacggctatgatgcactctaaaaatgtagaaaagctcagtaagatggcaaagatcatggagactaccatctttgtaaaaaacgctccatcctatgcaggtatcggcgtgggaggcgagggctataccacatttacaattgccggtcccacaggagaaggtctgacatcgccgagaaccttctgcagaaagcgcaaatgcgtcatgacggatgccttcagtatccgttaatgtaaaggagaagcgcacatgtcaaatgtatatataaaaacaaagatacgaagcggaaattatgcaatggaatacctgcgtaagatccgtaaaaaacggattctggttgtatgcgacaaatttcttgcggagagtggggcaatcaattatatactggattctctggactcaagcaactctgtggagctgttcgaccaggctataccggatcccaccattgagatcgtgggcaaggggcttggggtgctctgcagggtacgccctgatattgttatcggttttggaggaggctctgccattgatacggcaaaggcaatgatttactttgccggtgtgcgtgagctggttcccaaacccaggtttgtcaccatccccacaaccagcggaaccggttcagaggttacctccgctgccgtgataactgattcggaaacaaagagcaagcatctgatctcatccgaagatatcctggccgatgtggcgatccttgatccaaggctgaccctgtctgtgcctccggctatcaccgcgaatacgggtatggatgtgctgacacatgctttggaagcctatgttgcgaacggctgcaatgtgttctccgacgcattgtcggaaaaggcaacggaactgctgatcaaagctctcttaaaatgctaccgggacggaaaaaacctggaagcgagaaccctgatgcatgaggcgtccacactagcaggcatggctttcaacacagcgggcctggggttgaatcacagcatcgctcatcagcttgggggaaccttccatattcctcacgggttagccaacgctatgctgttaaataaggtgattgagtataacagcgtcaaccatgatattatgaacaagtatgcgactcttgcatataaagttcagttagtcggtatgaacgaggccccggagatggctgttaaaacccttgaggagctgattcggtctctgatgtgctgtatggatatgccggcatctatcagagagctgggaatcagcagagaagcgtatgaggggcagcttcagaatatgactgacaatgctcttatggataattgtcttataagtaatccgagagaagctggaacagaggctattaaggaaattttattaagcatctattaatatacagatgaaatacagaacagatgccttatgacaagatagacataagaccgtgccgcccaaagggatacagcacggccttttgccgttccaatccaaccctctgcattgaaagatgattgttataaagaaataaaagtgataaaatagcagtgacaggcagtaaagagagggataatcagatggcggaatatcacaagatgatgcacatggatgaagtggaaccagatgcattggatgaatatctaagcataaatgaagaggaccgtatcaacgaactggatatcattcatctgttcggaaaagagaaactggagaccattcaggagagcctttccaaagcaaccgggctggcttttataaccgtggattttaagggggatcccattacatctgctacatccttttcacgatactgtgaaaaggtccggaacaatccggtggcaatggaacggtgcaaatcatccgatgcgttcggatccatccaggcagcggttacacagaaaacaaacgtatacttctgcccatgcggacttttggaggttgcgataccaattatcgtgcgcggtcattatctgggcgggtttatcggcggtcagatccaatgtaatgacgcacccgattcggtgagccggttatcgtccgtgatgcacgcggcaaaagcggatgaagcggtggtccaatacaaatcgttgctcgatgaaattcctgtttattcatatgaaaaatttctggacatagccaatcttgtttttctggttatcaatcagttaagtgagaacgagatcagccagcatctccaggaagatattttaaaaaagcgtattaaaaagatacagacggtaaaccatggttacgccaaggagattgtacagaagaacaagagagtacaggagctggaaatgcgcggcaaccagtatgaacttctggacatgctgacatcgctgcttaatttgacaattatagaggacgcgcccagaacaaacgaactgctgagctctttcattgattatataaagtataaatacatggaaaagagtaccttcgtgcacatctccggagagcttgaacatgcggaacagtatctgctgtttcagaaaaaaaagacgggagaccggctggaatattcgattcaggtaccgaaaaacctgcatatgcagaagatgccctccgacgtattgatgccctttatccaaaatgctttttataatggcgtgatgctgaaaaaagaaggcggacagatcactgtaacgggttacgtgcgcaacggtaatgtagtgctggaaattaatgataccggtccggggttgacggaagctgagctggatatcaagtatgaaacatacaaagacaaacacgaaggatattacatcaaaatgggcatggaatacgccaggggaaaaatgaagcgcctgtttggagaggagtacagcataatctcagaaagctacagaaacaagggatcaaaaactattttactatggcctgaacattatgaagaaaggactgagtaatcatgtacagggttttgatagctgatgatgatatacttatgcgcgaagcgctgaatataatgattgcgaaggacagtgcgttcaaggtggttcatatgacgggaaccggcgagggggcggtgcgggcttgtaaagaggacgtgatcgatattgtattcatggatatgctgatgccgggaatgaccggcctggaagccagcaggattattcaccagtcaaatccggagattaatatatatatcctttctgcccatgctgccaatattctgatccgcagcgcagctcacagccaggtaaaggattttctggaaaaaccgattacatacaactttctgaaaaagatcctggagaactataagacagagcacgaagattctgtgcagaaccagcttgagacgcttgcttcatatctcagaaacaaaaatttcggagatttttacggcgggattgccggagtcatcgatgagatctatgggattgccggggaggattcagtccggcttattaagctattcacttatctgggacaaaaccttttggataccagaagcatgtatggcgacagcgggaatatatcagagctgtttcctattaacgaggtgttgattctggaccggaaaacatccgagctttggcttttcagggtgatggattttctgttccagcaaaacagtatcggccgttatccgctgttggagaatatttttatttatatagagaaacatataaaagaagatatcacgcttaacagtattattgagaactgcgccatcagccagggatatctgagccggattttcagggagcagtttcaggtcagtgttacagagtatcttcatatgaaaaaactgcatctggccaagggatatttttactttaccgaggacagtattgcggaagttgcgttccgtctcggatacaatgaaagcagctatttcagtaaagtgtttaaaaagtttgaaaatatgacggttaagcaatacaagaacaaaattcgtcaaagttctcctgaaaaaaaaacggaaactggccgttgcgggaatcgctaatcgggttctgattatgacatgcgccagatatccggattctgtgagagtttcttttcatctggagctcgaccagttggttggtaatgagttaaccttgaacatgccctgggtatctccagggcatgttctgcgtggatgcaggtttggattgtcctgttttatcaaaaatgtccccggcttatacatgtggtgtctaaaatgacatgtataagccggggaattaattttttttatttgaaagaagtctgtattgtgagattttttagcttatatattgaatcggttttttatagaaattagggtatgatggtggtagaaaaataatatataaggaggatgttaaatgatagcaaaaggctttacagaaccaactgaacgaataaagcgcttaaagaaagcgtttgtggctgctgtaccggaagttgagtcggagcgtgccgtactggtcacagaatcgtaccgcgaaacggaagggatgcctatccttataaggcgcgcaaaagcgctggagagaatcttaaaccatcttcccatcgtaattagagatgacgagctggttgtgggtgtaattactaaaaatctccgctccgcccagatctatccggagttttcgttcgaatgggtggaaaaagagttcgataccatggataagagaagcgccgatccttttaagatcagcgaagctgcaaaaagtgagttaaaggaggctttcaaatactggaaaggtaagacaaccagtgatttggcatccgcgtatatgtcggaggctacaaaagaagctatttccaacggtgtgtttacggtgggcaactatttttacggcggaataggacatgtgtccgcggattatgggaaagttctggagcttggattttccggtctgattaaactgattgtggagacaatggagaaactggatcagaatgatcctgattatgtaaaaaagagaaccttttatgaatcgatgattatttgctacaacgcatccattcagtttgcccgcagatatgcggctaaagccagggagatggcggcttcatgcagttgcgcggtcaggaaggcagaattacttcgtattgctcaggtatgtgacagggttccagagcatggggcgactaatttttatgaagcatgtcaggcattctggtttacacagattctgatccagatagaatccagtggacattcgatctccccgggaagatttgaccagtatatgtatccatatctgaaaatggatcataatatttcagaggaatttgcacaggagcttctggactgtttatgggtaaaattcaacggactcagcaaaatcagagatgaagtatccgcacaggcatttgccggttacggcggattccagaacctgattgtcggcggtcagaccggcgatggactggacgcaactaacgatgtctcctacatgtgtatggtggcggcagcccatgtgcagcttccgcagccctccttctcgatccgtgttcaccagaatactccggaggagtttctgtacagagcatgtgaggtggtacgcctgggaaccggcgtgccggccatgtataatgatgagacaattatacccgccctctgcaaccgcggtgtatccctggcggatgcgagaaattacggcatgatcggctgtgtggagccgcagagcccgcacaagacggacggctggcatgattcggcctttgtaaatgtggcgaaaatactggagcttacattaaatggcggaaagaacaacggacaccaggtggggccggatacgggagatgttacgtcgttcaagagtattgaggatgtgtggcgcgcatttgagaaacagatccagtactttgtacatcacgtagtagaagcctgtaacagcgtggattatgcgcatacagagagaactccgcttccattcctttccggtctggtcgatgactgtattggcaagggactcagcctgcagcatggtggggctgtctataattttacaggacctcaggcgttcggtgttgctgactgcggtgactccatttatgcgatgcagacgcatgtctttgagaataaagaacttaccatggctcaattaaaggatgcgctggatcacaatttcggctgcggctgctgtgagaccgcttccgacgatgaggccaggatttacgaggctgtaaaacggattctcagcagtaacggttccattgacgtatcagcccttcagtcacagctttctgcatcgcagaccgcgaatgcaggggacggggaatacgcgaggatcaaacgcattatggagaacaccacatggtacggaaatgatgtggatgatgtggatctgcttgccagacgatgtggccagatctactcacgtgaagtggaaaaatataaaaacccaagaggcggagtataccaggcaggatgctatcctgtatcggctaatgtattgtttggaaaggatgttggagctctgcctgacggacgtcttgcaaaacagccgttggcggacggtgtatcgccaagacagggcaaggacacaaacggtccgactgcggcagctatgtcggttgcaaagctggatcatgagaactactccaatggtacattgtataaccagaagttccttccatctgccctggcaggcgatgaaggtctcaagcgtttttcagcagtggtgcgttcctactttgaccataaaggtatgcatattcagttcaatgtaattgacaagaatattctgttggatgcacaggcgcatccagaactgtataaagaccttgtggtgcgtgtggctggatacagtgcgcagtttacggttcttgctaaagaagtacaggatgatatcatcagccgtacagaacaggccctttaaacgttaaccctaaaaagctatcataccaaaaagaccggactgtaatgcagaccggtctttttgagaacaaaatagattgtatttcatggaaaacaagagtaaaataatttatataatcattgaagaggaaaaatgatggaagaactcgacaggatattcgaagatacaggcccgcttgcatccactgaccaggaagaaagggacacaggggagaccagccgcggaattggttccatagatataatccgtctctttggaagagacaagctggaacatatacaggagagtctgtcgaaggcgaccggacttgcgtttgttacagttgattataaaggggaaccggtcacagacatgacttttttctctgatttttgcagaaaattcagggaggataaggaactgcgccagaattgccggacttcggatgccatggggtccattcaggccgcagtcacaaagaaaacccatatttatttctgcccatgcggtttgattgagatggcgattccgattgtggtggagggcaattacctgggcggttttttgggcggccagttccgctgcgaggacgccccggagacagttaggcaaatagaaccgactgttgagacagaacgtttcagacggctgcgggaggaatcaaggcagagatttgaagaactaccggtatattcatatgaaaagatactggatatggcaaatctggtaagtctggtgatcacacagctcagtgaaaacagggccaaccagtattatcaggaggatatgctgaaaaagcgcattaagaaaatccaggagacaaaccagaagcatttaaaagaaaaagctgagctggaggtgcgtttccatgagctggaagcacagtccaatccatacagctacctgaatatgctgattgccctgcagaacctgggaaccgtggaacaggcggagagaaccactgagctggcggatctgtttatcagccatgtcaaatatgggattgcggacaagggcacctttgttcattttgcaggcgaactggaatatgtagaacaataccttaaatttcagaaaatacggttaggttctcagtttaactatacccttcattttccgcgggaaatgcagatgatgaagctgccggcaggcgtgctgtttccttttgtccaaaatgccttctatcacggcgtcatgctgagcccggagggcggatcgatcagcttgaacggttatctgaaacagggtaactttgttttggagatcatcaatacaggcagcggtttcagtaatgaggagcttaaaatcagatttgaaccatacaaaaataatcatgagggatattatattcagctgggaatggagtgcgcaaagagaaagctggctcagttgtttggagatgagtatactattacagttgagattaacaaaaacaaaggctgtagatgcgaaattatctttccggagtataagtaagaagggatttcaaaattatgtacagaattttgattgttgacaacgatatgctttcacaggaagcgcttgaagcaatgattgccggatatgaacagtttgagattgttgataaggtgacaaccggagagaaggctgtcaaggtatgcaggtcatgcgcagttgatcttgtatttgtggaaatgcagctgccgggaatatcaggcgcggaaacaggtcggctcatccgccagttttgccctgatacggtgatctatggaatgacagtctgcacttcggccggcctgattgagagcattgttccggggacggtaaaggcaatgattgaaaaaccggttatggccaaaaatctgaatacaatctttagaaactataaaacagagaaggaagatacctcaaataaacaggtggaggagttggtggagatactgaaagaaagggactttcagatgttctaccaaagacttccggggattatagactgtatttatgaaaatgccggccctgagccggaccggctggtgaaagcattttcttacatagggcagcagctgacggacacgcagaatttatatgatgaaaagaataccataattgaactgtttcccatcaataagagtttgattttagagaagaaaacatctgagttgtggctgttccgcgtggtcgattatttgttccagcagagcagtatgaaacggtatcctcttcttgacaatatttttctgtatattgatcagcatattaaagaagagattacgctcaataagattattgagaactgtgcagtcagccagggatatttaagcaggatattccggtcacagttccatgtgagcgttacagagtatcttcatatgaaaaagatgcatcttgcgaagggatatttttatttcacagaggacagtatcggggaggttgccttccgtcttggatacagcgaaagcagctatttcagcagagtatttaaaaaatatgagaatatgactgtgaaggaatataagaataaaataaaaaaatgaaatctgtttgatgtaaatgcggtctgctctgtgtaatgcatagaaggccgcttttctctttatgggaaagtatttatttttgattaaaaatatgaaaatagcccgttaaaaaagctggtatagaaagtaaataatttggatttagaagatatagagtccttcttcaccgaaattgtcattttcaatatcatcaaattcatttaaaaagtaatctacatctcaaaagtcctcctcatcttcttctgtaatacattagctcgaactggctccatatcatatcagatacattgattgtatcatgagaacgaaggatgcggaagtacagaagcgggagaacgacagcggtagttacgcatggctatttcgtataattcatgcaaaggaatcggtttatggcaaaagtatagttctaaaaagagaatattagtgccacagttgtaggataaagatattatcaccaaacatgtccaacacagactcgaatggattttacaggtttatggttttgattttgcatatagaagaagaaatagctatggtataataaggatatgttaaatgaaagaacaggagaaaccatatgacagaccatagccagataacagaatttgtaggtactgcaataggagatacgatcggtctggtgattcccggaatcgatccttcccttgcaccatttatgaagctgggagaataccgttctattggcatctttggaggccgcgtggcggtagggccgcaggtgattgctgtggatgaggctgtaaaggcggctgatgtggagctgatctccatggaggcatccagggacagcaagggcggagctggatgcggtaccctgttctatattggagccaacgatgtatcggatgcaaggcatgcggtagagaacgctctggaacagctgccgaaacagttcggcgaagtttatgtaaatgacgcaggtcatctttcctttagctatactgcgagggcggggcagtgctgtgtcaagacgctgggagcggtggaaggcaaggcgtttggaatcatatgctgcgggccggccgccataggatgcctcgtatcggatctggcggtgaagtctgccccggtgactgtgatcggttatcatcaccctcttgacaattgctttgctaatgaggtggtgctgtgtttcacaggggaatctgcagcggtgcgacaggcgctgcggacagcgattcatgcgggtaaacaacttcttggttctttgggcgaagaacctcattctctgggaaatccgtggatttagaagtttttgcaagaaaataaaagattaccatggttaattatgtggccatgcctataatggttgatgtgggagattcacctgttattgtcattgatgtggaccattatgagaaaatttgattattagcgatacttagatctgcggagcggaagaacgctccctagattttttgcgttaatggatccccacagccgataatccatgggctgtggggatgaggtatatttttatgtctggatttttccagatcctaagagggaccaaagggaagcggtaccatgaagcccggcttgccccagaaagctggcaggaagcagaggatgattcttgtaaataaaaactgattacgaagaatacagcgggaagatggtactcagtataaaattcagtagtgaagaccagactgcattggattatcgtgggagccagaaatcatttggaacagtcttttattacgcttatacaaaactggaagattttaagagattttttcaggaaatggaattaggcaaaaaagcatgacatgacaaaatttcctgtaaaggcacatttcagagctgactgctatcccgttattataaaaagattgtttatcccggtaaaatggtttataatatgattagcagaaaggtatgatgtatgagaatatatttggataattgttgttacaatcggccgtttgatgatcagacgcaggaacgtattcatctggaaagtgaagcaatccttactatattgaaacgagggcaattgaacgtatatgaaattgtcggaagcgaaatgctggaattagagatggaacgtatgggcgatgagacaaaaaagcggaaagttaaagagctatatcaggttacacatatgcacgtagcctatacagatgagataaaaaaacgatcagaggatataatgaagatatcaaagatccgcacatttgacagtttgcatatagctgcagcggagagtgcgaatgcagatgtgttgcttacaacagatgacaaaatgagcaacatggcctcaaaattagagttaaaagttaaagtgcagaatccactacagtttgcctgggaggtgttctaaatgttaaatgttgatttgaataatccagtcgatgtaagaaatgccgggatgaaggtcctaagagaagcactggggccagtaggaatggtcaaatttatccagcaatttgatcttggttacggagactatacagaagaaaaatatgagagaccagatattagtctggacgagattgatgcaatattaaaaagataatatatttatggatatacatttgcaaagagagagtatagacgacatataaataagtggcatctattccaccgcagcaacacattaagctacggtagtttagatgccgaattgtggttttggagaaaaatagaggataaaaccacaagatgtagtggtttttggggaaaaaatgagtggatttgcggcctgaaaatgggtgtttttcagggcgtgagaaatagatgccttggccctgggagatgagtcttccagggtttttggcttgtaaagattactttcttttgagatgtttgtcgcaaacgcattctacgataaaggactatgtacaatatttttgaatatgctgtaaagtgataagtttttatttatgtaataacctgaaaaaatatcaggcactgttagtcatagaaaataaccgcaactttcccgtattaccagttcgtatggtaaatattcttgactgactgcaataggttcattctgcatgagggccagcagtttctggaatgcaatccttcccatcatctccttgggctgacggattgtggtaatcgctggttcccatacagaagaaagatcaatatcatcaaagccgacaacagcacagtcttcaggaacacgcagtccctgatcttttaatgctttcatagcaccgattgccattgtatcacctgcggcaaatacagcggtgaattttttttgttttgcaagtaatgtccacatctgatcatagccgcccttgatggcgggttctccgtaactgatcagttcattatcaacaggaattttgtgttcttcaagagcagaaatataaccgttgagacgatcctgataaggcatctgcaaaggtgatacagtgaggtgtgcaatctcgcggtgtccaagccggataagatgagtcataagcgcttttgaagctgccatattatcaatggaaacgcttggtattttgtaattgggtacgcattgcactaccataactaaagggtatttttcagtaatcagtgtttccagcttttgtgtcatattagcggatagggaaatgattccgtccacctgccgctgcttaattgcttcaatgtaatgcttttctaaggacggctggctctttaaatcagcaatcagcatttgatatccttgccgttcagcttccgtaccgatacctgataatattccatgaaaaaaggagttttctatattaggaacaataacaatgacagctcttgttgtctgagtccgaagctgacgtgcaagaacgtttggctggtaattcatttctttgattatccgaagtacatgttctttagttgccggtttgacaagatcggggttactgagcactctggatatggttgcaacggaaactcctgcggcattcgctacatcttttatggttggtgcattcatatttatcctcccaagaaacaaaaattgaagaacgcatttatatggagcggaactattttttaatgataaaaactgtaatcgattacattttataacattaaagtgggcattgcaagaaaaacatgcaaaataatttaaattgctatttgacatgactgtaatcgattacaatttaaaaaaatccaaacagatatcaacaaagctaaaattggtaaaaagtaataataattacaaaataatatcagtaaaaataacaattgacaacaatgacgatatccattaagctatagacataaattgtaatcgattacagtataattcaataaggagggcaagatgacttttaaaaggtttgattctgtggttgcgtggattgaggacattgtttctgcgttctgcctggcagggattgtggtgatcgcagcgggaagtgtatttgggcgttatgttttacatacgggttttctatgggcggacgaagtgaaccagatgctgcttgtcgccatgggcatgtttgggagtgcaagagcagtgcgttccaatggtcatgcggaattcacctcttttattaacaaccggaaatcaagagcggcgcgaattgcaatgcgggctgcaatcaatatacttacaattgtgttgttggtgttcatgttcgtgatttcaatgcagtttaccttaggcggaactatgaagagtacggtacttcgtattccgagaatgtatttttacatgtcaattcccatgggattcgggctttgcatttatgagtatctgaaagtggtcaagataaagatattaacggacgcagcgtccgagaaagaataggaggaaacatagatgggagaaataattgcgctcctggtcattttgacctttatttttatcattgcaggtatcccgatttacattagcctgatgtttaccggtttgctcagccttgtggcactggcatcatccacagcaactcctcttgccacactggttattccacagtctatttttaacggcatagggagtctgccccttttggctataccgtttttcatgcttgcaggtgagattatgaaccggggaaagattacggagaagctgattcggtttgcaatgctgctgattggacgcctgcccgccagtcttggcctttccagtattgtggcgagtatgttctttggcggcattaccggttccgcacaggcaagtacctcctgcatgggtggtatcctgattcccgccatgaaagaggaaggataccccacaaaagaggcagttggaattattgctgcggcttctacctgcgggccaattatcccgccgagtatcatcatggttgtatttgccaccgcggttgggtgttcggtcggagcaatgtttatgggaggcttgataccggggattctggtgggcttaatactgatgattgttttgctggtccgtaatcacatgtatcattttccgaagcacgatgaacggctgagccgcaacgaagttgtgaaggttgctcttgatggtatcattccattgggcatgccggttattattgtaggaggtatcatgggaggtgtatgtactcctacagaagcgggagccattgcggttgtttacagtctgctggtcagtctttttgtcagtcgtaccttaaggcttcgagatatttggtccctgctgcttgcaacggttaacagtgcggcgccattgctgctgattattgcctgcgcccgggtattcagttacggtctgacagcgctccagatgccggttattgtgaatgacctgattctttccttaacaagtaacaaatacgtatttctgatgcttgtgaatatcctgcttcttattatgggaatgtttatggatggaggcgcttccgttattatccttgctccgattctggctccagtcgcggctgcgcttggtatcagtacaattcattttggtgttatcatggcgcttaaccttaccattggtaatattacgcctccgctgggatactgcttatttataggaagtagaattggagatattacggtggaggaaggcatcaagggcattattccatatctgattgcagagattgccgcattgctgctgattacctatatcccgtcgctggtcacctatgttccggtgatgctgggatacagtgtggtataaccgtataaggaaataaattgtaggaggagaaatatatgaagtttagtgcctgtaccgcggcctttggcatggcggatctgaaaaaaattattgatacttcggcaaagctgggatatgacgccgtggagcttaccgcggcccttcacctgccggtggaatccacaccggagcgccgaaaagaggttttaggctggattcatgatgcaggaattgtttgcagcgcccttcactatattttcgacggaaccattcggcttttgagcacggattcggagatgatgaatcagtctgctgcctatttgaaacaggtagtggatgttgcatatgatatggaatgccctaccgttatagtgggaagcggcggaaagaccagaagctttgagcctgactgggacagggaggcaggagtgaaatgtatggctgaggtaatacgccaggttggtctgtatgcccaggaaaaaggggttaccctggctgtggaggcaattaaccggtatgaaaccaacttcctgaacacattggaagaagcggtaaattttgtgaatatggtaaaccttccaaatgtgcgtaccatggcggatacctatcacctaaatatagaagaagtaaatccggctgaaaccatccgcaattatggacataccttggcaaacctgcatcttgcggactcaaaccgccaggcgccaggagacgggcattttgactttgcgtctgtggcagaggcgctgcgggaagtggattttaaggggtattgttcctttgaggtatttgggctttatccgtggaagctctggtatgacacctttgaagagtcagttgaacatatgggtaacggtattaaatacgcccgttctatttttggatgatttatgctgtaaatagataccgggacatacgtctggaagtatggaaaggatggatattatgagaaaagtggcattggttgattatgggaaattagaattacaggaaaactgcggtgacattaagacccttgaaccgggaacggttaagattgatgtaacagcctgcagcatctgtggaagcgatatagcgctttaccgtggaaaacgttcccttgagaatgaaagatatttcgggcacgagttttccggcgtggtagtggatcctggcgacggcgcaaatggtattaagaagggtatgcgcgtggcaagtgagctttccagagcctgcggacactgctggaattgccgcaacgggcttccaaattattgcaggagcatgaacgatgcccttttgcccggaggattttcagaggaaaccctggtgttaaatacgcaggaatacagttttatcagtcctgttccggataccattgatgatattactgcaactctgctggagccaaccaattgtgcttaccatgtggcacgtcaggctaatgtgaagcatggggaaacagtggttgtatttggtatgggaccgatgggtctgattgcgtcccgcattataaagagcatgggcgtagatgtggttgtgggagtggataatagtaaggcacgtttggaaaaagtgcggagtcttggatttattgaggtgattgacagcaatgacgggaactggcaggaccagatatttgagatgtgtggctcaaagggtgcggatgtgattattgagcttaccggagcgctcccggtccttcagagcgcgttccaggtggtccgtccgggaggacgtatcgtggtgggcagtgtttacagcggctttgcagaacaggtggagcttttgcctattatgcgcaaagagctgaccatccggggctccaagggaccgtatccacatcttaagacagatggtaccagcgcggcagttgatattctggtgaggcttcaggatgatttaaagaagctgattacggtttatgattataaggatgcccttaaggcgtttgatgacatgatgtctggtttggcaatcaagccggttatccggtttcgatcataaaaaatagaatggtagaataatttcaggaaaaggagattttgtaatgacaaacaaagagcatgtattgaaatatggaggaaagtttagtatcagcggcggtgaagtgtggacaatgccaaatggacacgatgttcatttcgctttaaatccaaagatgggatgccgcggagcaaatatcgcggttggatttcataagccaggtaaggaatttgcgccccataagcatcccatttctgaggaaatcctcatcatccacagcggtaagggtgagtgttacctttatgacaagtggattccggttgagacaggagatattgtgtttgcgcctcccggcgtcctgcacggtacccgcaatccagcggaaaatacagaggactttgtaacgcttggtatcgcgacgccgccccagcttgacctttacctgcgcgcaggctatgacatactggaggataactccggagaatatgtggaagaagtataaagaggaaaatggaggaaagaaaaatgttctttgatacatatagtgaaatgttaaatgatacgattgatggccttaagagagaggatatacagaaactgtttgatttgattgaggagactaggaataacggaaaacatctctttgtgcttggcaatggtggaagcgcggccgccgcatcccattgggtatgtgattttggcaaaggaattaacagaggagattccaaacgcctaaaaattttttcaccggcagataacggggcaattttcagcgctcttggtaatgactgtggatatgaaacaacgtttgttgagcagatgaagaattttctggagccgggcgacctggtattaaccttttctgtttcaggaagctcatcaaatcttgtggaagctcatcggtacgcaaaagagattggtgcaaaaacagcctgtgttgttgcggataaaggtggtaagataatcggcatgtctgattttgcaatgattatcccatctgagaattatggtgttgttgaggatattcatgtaattctgggacatgcaatctcacagcagatttatgcagacaatgtgggggcgtaaggcatattggaggatgaagatatgtatattgcggcactagacattggcggaacaaaaaccattgttgctatactggatgagaatggtggaattttgatacaggaaagttttccgtccattgtcgaaagatatgagacgcatctggaattatgcgtacaggcaatgaaacgtctgatgcatcagactgagttacaggcggaggacttcgccggactgggggtgtcgcttccgggaattgtggacaacgaaaagggaattctgctttacgcaccttatgcaaactggaaaaatgtggaagtagcgggctatttgagtaaaaaccttgggatttcaagggtgcggtgcgagaatgatgtcaacgcctgcgctattggcgaaaagcggtttggactaggaaataactatacggatttcatatggatgacagtgagtacaggcgtgggcggcgccgtggtggaaggttcaaaactggtacggggaggccttggttttgctggtgagctgggacacttaaaagttgaatataagtcgccggcgcattgtccctgtggtcagtatggatgcctggaagcacatggttccggaacagcgctgatacgggagacaaggaagcgcaggcttacatctcccgcatttgcaaaagcgctggatgagatggggttaaagccggatggggcaggatgcgcagctcttgccagggcaggaaacacggatgccctggatattttgaatcagattggtacatacctgggacgtggtatttcctattgcattaatattttaaatacccaggcagttgtgattggcggtggggttgcagcgtcccttgatcttctgcttccatctatccgcgtttccgttcagcagaatgcatttaaacagatgcaggatattgatattgtaaagactccgctaggttatgaagcggcccttctcggggcggcagccctggttctggagcagtaagggcataagcataatatgagacaggaggagagaacggatatgaaacgtttaaaagcagcggttattgggtcaggatttatcggagcggcgcacgtggaagcgcttaagcgtgtgccgggtgtggatgttgtggcattggtagacattgtagacccggtacaaaaggcagaggagctggatgttccaaatggattctcagactatcgtgagatgattgaagcagtagaaccggattgtattcatatttgtacaccgaaccatacgcataaagaaattgccctctacgcattcaaacatggaattcatgtaatctgtgagaaacccatggcaaggaatgctggggaagcaaaagaaatgctggaagcggcaaagaaaagtaatcttgtccatgcaattaatttacataaccgattctatcccgccaaccatcagctgcgcaatatgattctggatggggctctgggtaaaatatacggcgtacatggagcatatttacaagattgcttttccaaggaatcagattttaactggcgtatgttgtccgacaaaggcggaagtacccgcgtcacatcagatattggttctcattggattgacctggcggagtatgtaattggaagtaaagtaaaagaggtatttgcggagttccagaccaatctgccagtgagaaagatgaatctggcaggggatttaaaggacgtagcagtggatacagaggatacttcttatgttatggtccgctttgagaatggagctgttggcagtgctgtattttcccaggtgtatcagggcaggaaaaatcagaccacgattcgtgtatccggttcggaaatttctgctgaatgggacagcgaagccattggtgatttgaagcttggataccgaaatgaacctaatcgcctgctgacaaaagaccgtgggctggctcatccggatactgcgccaatcataacctatccgggcggtcacgcagaggggtttccggatgcttttaaacagaattttattgctgtttatggggcaattcgtggagtaaagccgattaatccatacgcagactttgaagatgggctgcatcagatgcaggttctggataagatatttgaaagcgcgaaaacaggccgttggaccagtgttaattaaaaacgggaggaaacaatcagaatgaagattggcattgtagcaaatattatgcaggacaaacccctggcagaggccctggactattttcggaacataggaatccagacaatagagccgggatgcggcggatatgccggcaagtcccatgttaatcccgcggttttgcttggggacaaagaaaagatggatggatttaagcggaccatagcggattccggtttgactatcagcgctctttcctgccatggtaatcccattcacccggatcggggaattgcagctgcctatgacgaggatatgcgggacgcggtacgcctttgtaaagaacttggactggatacgattacctgcttttccggatgtgccggagacggtccggattcaaaataccccaattgggtgacctgtccctggccggatgattatcttaagattctggattatcagtggaatgaggtattgattccatactggaaggagtttgctgcttttgcaaaggagaatggcgtgacgaagattgcattggaactgcatccgggatttatggtttataattctgaaaccttgaaacggctacggggggaggttggaagggaaattggggtgaattttgacccaagccatcttctttggcaaggaatggaccctgtttcggtcatccgggaacttaaggacgcaatctatcatgtacatgccaaggacgtaaaggtggattcaatcaataccgcggtcaacggcgtcctggataccaaacattacagcaatgaaattaatcgctcctggatattcaggaccattggttatggcaatgatacggcttactggaaaaatattttttccacactgcgtatcataggatacgatggggcggtcagtattgaacatgaggatagcctgatcaaccggttcgagggcctggaaaaagcggtcaggattgtcaaagaatctctgataatggaagacaaaacagagatgtggtgggcgtaattaactaataaagaatgataaaggagattaaccatatgaaaaagaatcttatatccatgttacttataacagccacagcaatcagcctggccgcctgcggcagctctaaggcccctgcttctgccggcagcagcggcacatctgcctcgaaagacaccgcggcatctgtcaatgcttcacaggtggttgtaaagtattcggtaacgtatccatccaccggtacgcaggcagagggggcgctgaaattaggagagctgattgaagagtgctcagatgggcgtatgaagatggaattctatccatcctcccagctgggggataagaccgcaacctttgagggcctgggaaacggaaccattgagatgacggagtgcgctgccacggatctttctgcatttaatgacatgtggtctgtattctccctgccgtatctgtgggaaaacggacagcaggcctgtgcaacagtaatggacccggcggtccgcgagatgctggaagcggacgcccaagccaatggatttgtcatcattgcgtggactgacattggaagccgcagcataatgaaccagaagaaaacggtcaataccccggcagaccttaccggacttaagattcgctgcatgcaggatccgattctggcggattcaaccaatgctatgggtgcaatcgccacgcctcttggtgcaagcgagatttataccggtctgcagcaggggaccattgacggccttgaccataccccctctgtagtggttgccaatggatggcaggaactggcgaagcatttctccctgacggagcatttcactataccggacccggtattcgtaagtaaggtatggtttgacggcttgtctgctgaaaatcaggaagctgttctggaagccggcaagaagttctctgatgtatggaataatgagatctggccagaagcaaccgaggatggtatgaaggcaatgaaggaacagggcgttgaaattgtggaggttgataaagcgctgtttgaagaggctgtaaaaccggttgttgataaatttctggcggatgccagcgaggatcagaaggcgctgtatgatttgctgacaaagacacgggaaaactattagtgggaggaaatacgttatgtatgagaaaaggctgtgtggggttgttattcccaccattacaccgatgaatgaggatggatctattgatgacgcgtcgcttgcgaatttcacacggtatctattaggagccggtgtaaatgccctgtatcccaacgggacaaatggcgagagcctgctcctgacaaaggaggaaagggaccatgtggcagaggttatggcgaacgtgaacgctcaccgccttccgttgtttatccagtgtggtagtatgacaacaggagaaaccgcatcccacgcagtacatgcggttgatattggggcagatgggattggcattatgagtcctgcatttttccaaatggatgaagaatcgcttttacagtattaccgtgacgttataaaaggccttccggagaattttcccgtgtacatatataatattcccggttgcacgactaatgatgtaaagcctggattgctgcaaaagttgatggaggagtttcctaatatcgtgggaatcaaatacagcagcccggaccttatgcgggtagaagattatcttgaaacagatggaagaaagccagagcttttaattggctgtgacagcttgtttttgcagtgcctgatgacagggggcgtaggaacggtaaccgggccagggagtatttttcatgaaaggtttacgaggctttaccgacagtatcagcagggggattatgcaggcgcggctatgacccagaaaaagattgtggaaacggaccgtaagctggctgggattcctggtatcccggcgcttaaaacactgcttaagttgcgcggcgttatccgtacggatgtatgccgtggtccactgcgcccgcttaaggaagatgagaagcgcattttagaagaaatctatgatgcatactgtgaggaggaaggtattcatgagtaggaataaactgcgtatcggagtgattggagtgggctatgttgccagtaataatttcctaccggtttttccaagatttgatgatgtggagctggctgggatcatggcaaatcatcttgagagtgccaaaaaggcgcaacgtctgtgcggcgcccaacaggtagtgcagtctttggaagaacttgtaaagctcgatttagattgtgcctttgtgcttactccaaaggcatgccatgctgagcagatatcctttctcctaaaagcaggtatagatgtctatagtgaaaaacctatggcaacaacattgaaagatgctgaccatatggctgaattgtcagaacagactggacgcaaactgatgattggatttaaccgtcggtatgctccggtatgtcagaaagccaaagaagtctatacagatatccttccggatgttatcataggacagaaaaaccgtccggctacggaatatcacgcaacattggaaaatgcaatccatattgtggacttgatgcgtttttatggcggtgaagtgaaggaggtacatgcaatttctaaattcacagatccggattacgaaagctttaccacagcgcagttattgtttgaaagtggtgcgtcaggtatgctgatagctgaccgcagttctggccagtgggaagaaaatattgagattcatggtggcaaccgctctgtttttatcaaaatacctgatagcatcaccataacggatgcagaggagcagcataccacagagatgactccccttgctatgggatgggcacggtcagaagataagcttggtttcagctatgcaatccggcatttcctggactgtgtaaaagaagacagggtaccacttacaaatgctgtggatgcatataagacacatgaattactggataggatattgcgaagtgcaggccttccagggatggagtagaggtgaggagacacatgaaaattgccggacatacaatgggtacgccggaatatacggtgaacgaagcaattgagctgtttcataggattggagcggatggagcagaaattgttgttcaggatggatactgttcaggaattccttgtgattgtgatgaaaaaagcctttctattgtgaagcgttgtgcagaggaaaatgaaattgaaatttcctgcctgactccatataactcctactttaattcacttgataaagaagttcgacaggcggaaatcgaaagtattcgtaacgtgattgattattgccagtatctgaatgcgcattacattcgtatttatggtgggaatcttttggcaggggatacacaaaagttggaagaacgaagagagaaactgatagaatcactgcggtatctgggtaatctggctgcccagaaggatgttgtgttaatcgttgaaaatcattttaatacaatggcggtatctgcaaaggatagtgccgcattaatccgggatattgaccacccggcagtccgcatcctatatgaccaggccaatctgacctttacgggaaatgaaggatatgaagaggccatttctctacagcagcaatatgtcagttatatgcatgtaaaagacttggtatttttggaaggtaaggattttgtatcatctgacgtatcccatccggatgaatcagagagaaatgtgcgcactcgtattgtgggagaaggcattttagactggcctgcaatactgaaatccgtgaaggctcacggatatgatgggtggctttctctggaatatgagagaaggtggcatccggatgacattccggatgcgtccattggaatgaaaaaatcgattgactatttaaaaagtatacttttttgattccgaagggggaaaaaatgagtgaaaagatgaagattgccttgctaggagtcagtcattggcatttaccgctgtatcttccgggacttcctgagaattcggtagtcggtatcagtgatgataacattggtatcgctgaacgctatgccgggaagtacagctgccctgcatatcaggattaccgtcagatggtaatggaaacaaagcccgatttcgtatttgcatttgcgcctcactaccggatgaaagacactgcggaatatcttttaaagctgggcatcccattctcaatggaaaaaccagccggcatgaatgctggcgaggtggaatccttatatgaattttgtgagaaaaagaacggtttttgttccattccttttgtctggcgctatagtgatactgttaatgagctgaaaaacaaatatcttaccaaaccaattactcatatgtcctatcgttttattgcaggtcctccatcccgctatctggagacttcttcctggatgctttcacaacgtacagcaggaggaggatgcatgactaatctgggtgtccattttatagatatggctttgtttttgacagacagttgcagcgccaaaacattagcgtccgcttatcaatatagttctccatatgacattgagacttatgcgacttcattgctgaagctgccaaatggaacttccctgcttttggaaagcggctatgcttatcccatgtcggaggaatcgaaacgggagaaccgctggacaattgtcacagagaatgggtattatatacttgcggagaaccgtctggaaatcagggaatatgatagagagccagtgggtattccgttaaacacggatagtgacatatactacactgtttatacaaagacaacattgaacgattggttgactggggctaaaccccgcgcatcgttaaaagagatgctggatgttaacaggattcttgatgatatgaacgcaaaagcaggattataacaagaagaggaaagggaaaattttatgagattaggcggctttggacgaatcgcagactatgataatatccggcaggctggatttgattatgcggaactggatgtaccggagattgaagcattgacagaaaatgagtttcgtattttttgtgataaggtgcatgagattggttttccggtgctgacaggagcaagggcgcttccggttgccaagccatggttttttacggattcttttaacgcattggaatataaggcttatcttgagcatgcttgtcatagggcgaagttacttgggatggacaggattattattggaaatggtaaggctcgtctgctcatagatgaaaccagcattaaaaaagaaaatcggtttattgactttatgcgcatgtttgcagagattgcaggtaattatgatgtagaggttatcttggaaccccttggtcctatgtattccaactatattaactcactgccggaggcggtacggattatccgggaggtagatatgccaaatctgttcacaatggctgatttacgtcatttggtttgggcaaaagagccgctaacggatatcgtgtcctattcagattatgtacaccatatacacatggactacccaatctcgtatcccgagcgtcccttcccaaacgccaacgatgattttgattatacggaatttttggatgtcttaaaagaatccggatatcaaggaactttaacaattgaagctgatattccggaggattggaaacgggcatacagagatacggcggttattttgcaagcttttctgtgattgatagttttacattggtgcaggtggggataacgggtttttaaatcatgataactagagtaaaaaatttgaatggttatcttgaatcatatatacttttagtatagttatctacttgtgtgtcattatttgagagacagcgaaagggaattatcctagatactataaaaaggaagtattaattgagtataagctgtaaagcgtttcgaaaagacggcttgaattaggactttgtaacgctctgtaagccactgtgttggcttttggggcaagggatggagtaatgggccataccgcaataaatctggctaaattggcccaatataagaaagccccttttggataagaataattgatatcttaacgtcgcattcgtcgccatgaatcaaaccgtattccccgttcgatttgtgtgcaggttaaagggaggtgcacctaaaggcgcccctcccggccacaatcgcccgcaatgcgggcgtttttctgcttccacaaaggtgcacctgtttggagccttggtcacctgtcaggtggtcggtttttgctggagaccacgcaaatacaaggaaaatagcgcatttataggtgcaccctgtaggtggttctgacgtatttggaacagaatctttatgacatgtggatatggacttccgccgggatattcgatatggtgttggcggaaggaggagtgtccatgaagaaaactacgagggaacaatgtgaggaagtcatagcagccagggtagaatggctggtaacccgatggcaggcagaaaagacacaggaagaaaagaaagcagaccacaagctgaacgaacggatggaccattggatgaaggaaattaccaaggagcagagggatgccatagaggattgtattgatgacatgctggatggaaatgggatgtgtcagctgtatctgtatgaggaaggggtaaaggatgggatacggttgatgaagatgatacgggatatgtgatagtatgttttgaggatagccgtcatattatgtggcggctttttgtttgtttagagaggaaaacagaggcgaaaaaaatcaaatacaggcagctcccgtacaaaaaaatacatgccacgccaagggtggagtctgtctatccggtgggccatgccctggcccatggtggcccgccaagaagta

SEQ ID NO: 3402 - DNA, 670 bp, Unknown
  gut microbiota DNA sequence
tggaggtgcacctgtttggcgccttggtcacctgtcaggtggtcggttttggctggagaccacgcaaatacaaggaaaatggtgtatttataggtgcaccctgtaggtggttctgacgtatttggagcagaatctttatgacatgtggatatggacttccgccgggatattcgatatggtgttggcggaaggaggagtgtccatgaagaaaactacgagggaacaatgtgaggaagtcatagcagccagggtagaatggctggtaacccgatggcaggaagataagactcaggaagaaaagaaagcagaccacaagctgaacgaacggatggaccattggatgaaggaaatcaccaaggagcagagggaggccatagaggattgtattgatgacatgctggatggaaatgggatgtgtcagatgtatctgtatgaggaaggggtgaaggatgggatacgattgatgaagatgattcgggatatgtgatagtatgttttgagggtagccgtcatattatgtggcggctttttgtttgtttagagaggaaaaacgaggcgaaaaaaatcaaatacatgcagtactcgtacaaaaaaatatatgccacgccaagggtggagtctgtctatccggtgggccatgccctggcccatggtggcccgccaagaagta

SEQ ID NO: 3403 - DNA, 870 bp, Unknown
  gut microbiota DNA sequence
caccgcagggctgtatccatcaccgtatactgctgcaagctcgttgcaataactgcaggctctttttctgagtttcgtcatccacaccggattcttaacgacttttttctgtttattgattttacgattgtaattgctgccatacttttggtacggcctcttagccgggtgcgtggtaggcaggttatcaaaattcccgtaatggtttccagactctggttaatcaagagcttataggcttccgcaaatgtccggtctttcttttcccggttttccatatttctcttttctctacccggttcactccctccctgggtacatttaagcgcggaaccgtccccgtttttctccgcctgttaagggttttccgcaaatcttatcccgttggattttcccccttacagaggccttcatttgtatccctcccggtcccagacagttctcaatcaccagccggcggagtcccccggtcagcttctctgccataaaagacgcctctggcacacagtccataaagcagcccatctgaaactcagaaccactattgtttatatatgtgtccacgcaaaacatgcattgagtgtcctaagctatcgcatcgtgagatagataagggaagtatacggatcaacgccagtgctaattatcctgctttttatcgaaacaagcagaaatatgaaacagctgaatatctgcgtatgatgaggcttagaaaaatttggtcagagggtacttttgcggttttaaagcgagagcataacctgaatacaataaaaaagagaggcattcataaaacaagtgaagaatgcctgctttctgctgcgtcattgaacctaaaaaggatgataaaggtggcttaaggagcccatt

SEQ ID NO: 3404 - DNA, 188 bp, Unknown
  gut microbiota DNA sequence
tctgaatcattcgcatcagttcgtccacagactcccctgccaggccctgtttagaaacattgatggaagtcagcggaggcgtagtgacctcacagtttggccggtcgttgaaaccaatgatggagatatccccaggtactttataaccatgttccgagaatgcgcgaagggcgccgctggccatggtg

SEQ ID NO: 3405 - DNA, 181 bp, Unknown
  gut microbiota DNA sequence
gcaggaggaagagcgtatcaggcaggagaaagagcgcatcaggcaggagcaggaaagcgcagggcgggagccaggaagcgcaggacaggcatcaggaggcgcaggcacggccggcggccggcctgtgaaaagcataggcggcactgaattcggcagaaatgtggcagactatgccctgcag

SEQ ID NO: 3406 - DNA, 176 bp, Unknown
  gut microbiota DNA sequence
caaacggttccgaacccggatacttcactgtacatcataggataaaaaggtcggtaatgcggaggcttatttggcatgcccaaaatcagtaaaacctggaactaaacataaaaagggcccttttcatagaattggggcgggattttaacaaatcccaccccaactattgacaaaga

SEQ ID NO: 3407 - DNA, 145 bp, Unknown
  gut microbiota DNA sequence
atagtgcagtacaaagggattcctgctgcgctgcaggcggaccgagaaatacaggtacagttcccgttccgagaactggaattcattgggagagacctggataatggccggggcttcccggtactgcgcctcctccacaatggct

SEQ ID NO: 3408 - DNA, 145 bp, Unknown
  gut microbiota DNA sequence
cttggtaaccgcgtcgccgcgctcacccagcatcaggccattggccctggcgtccgggctgtttaaagcaatcctggtggatggtcccagatagccgtccaccacctggtcgtttctggcctgaaactgcttcacagccactacc

SEQ ID NO: 3409 - DNA, 761 bp, Unknown
  gut microbiota DNA sequence
gcttcgtctgcaacaactattacatcgttatgcagctgaagtacggatgcgggaacatgaggagttacagggccgcagagcacatcatggagaatctgagccttgtcagaaccgctgacaaccagaaggatttttttagccttcataatggttccgatacccatggtataagcctgtttcggaacatcatcaatggaagcaaagaaacgcttattggcctcgatggtgctctgggtcaggtccacacagtgagtggtcttggcaaattcttcgtccggctcattaaagccgatatggccgttatgacccaggcccagaagctgcaggtcaatgccgcccaggctcttaatcacgtcctcatagcgggagcactccttatcgctgtcaggctgggtgccgtctggaacattggtgcagtccatattgatgttaatgtgcttaaagagattgttatacatgaagtaatagtagctctggtcattatccctggtaagtcctctgtactcatccaggttcacgctctttacaccggagaaatccaaatcacctttgttgtaccattcgatcagctgtttgtaagtgccgattggggtggagccggttgccaggccaaggacacattcaggtttcatcaggacctgggaggcgatgatgctggctgccttgcggcttaattcatcgtaatcttttgctttgtagattttcataataattgccacctttccatacattattagtagttgcggtgccccggatttcca

SEQ ID NO: 3410 - DNA, 729 bp, Unknown
  gut microbiota DNA sequence
atcgcctgtgcctttttgacattcttttcgcagattgcattataaagctcctcatgaagaggaaggctttctaaaaacgggtcctccatgttcaaaggaaattcccagaacttatccatgacaccgctgatggacagaatcagctgatacataacctggttatgggacaaacggtagatggtatagtgaaacttcttatcctctgctgtctgctgctctccccggcggaactttgccatcagcacccttgttatggctcccagttcttctaactcctcccgggttgcggaatggatcaccatgcgcagtatctcccgctctaatatcttgcgtacctccagggtgtccaggagaagctccttctccttggcaaaatcaatcagtctcaaaaggtcattgacctcctgtcttcccacatagataccctttccgttcttagcttccagcacattcctggcttccagcgtcttcatggcttccctgagggacgtcctgctgacccccatcatctctatcagtttttcctgtgagggaaggcggtcgccgggttttaaaccattttcctggatgtaattctgtatatatcggattatctctgactgaagagatgtacgctgtattttactgttcattctgctcactctcatgatgttttttgttcaagtttataatattaaccttaccacgtatggcatgtattgtcaataatggattatattttcgtgttgt

SEQ ID NO: 3411 - DNA, 1104 bp, Unknown
  gut microbiota DNA sequence
ataagcagggttgaatcgccatggccccggacagctgacaatgatacttccgtccagtcacagcccccttggtcggggaccacgcaatgagggcggcctccggagaacccggaggaggtggaattcctatgatgcctgtacgctgcaggcaggcggattgactgccctgtccaggtaaccttttggacaagcttcggggcgtagtgtcaaatagaagcacaaataagaaacagaaagaaggtgagttcgatgtcagatcatgcagtcgttcttccgggatgactgcatggatgtgggatggaacgaggccaggatggaggaacgtgttacagatgggcattcccataacggctccaggagcgatacacatgaagaaatccacgaggtggaaatagagtatttccggaggaactatggaaacaatggagctgcttcaatacctgcgattcagggaggtacaaaagatactggatgaactgctgcgccaaaggctgattgacccggtcatgtatgacatggtccttcggaagtaccaaaggatatgttcccaacatattgtatgaaaatgtgagaattcggagaactaatacttgatatggtgcaggaagtgtggtaatgtgtcttgttgaaaacggaggaaaggaggcgcagcaagtggcagaagtattatgcatcccaaagaccataccagagcatacaggataccagatacggcgcattcgtgtgtgtgcatactgccgtgtgagcacggatgacgatggtcagtatcactcctatgacgcacagatggagtattataaagggctaatccagaaaaatccggactgggaattctgcgggatttatgcggacgagggcataagcggaaccagccgatgggggagggaggacttccaacggatgctggaggagtgcgaaaaaggaaggatagacctcatactaaccaaatcaatcacccggtttgccaggaacacagtggacaccttatctacggtccgccatctgaaggaaatagggggaagtgtgtatttcgagaaggaacgcctgaataccatgacggaggagagtgaagggatactgactatatacggtgcggttgcacag

SEQ ID NO: 3412 - DNA, 3597 bp, Unknown
  gut microbiota DNA sequence
tgaaaacatatcccaaaacgtccactggtcagcggtgaaccgattccggcatggtacattcgtgataagcaggcggccgtatggatacgataaggatgatgagaaggagctggctgtcaaggaggatgaggcagcatgggtccgcaggatggccagcatgtacatgaatggaatgagcggggtgaggatagctgactgcctgaatcagaaccaagtaccggcgccttatggcggtcgctggtcctccgaggcagtccttcggatcttgttcaacgagaaaacggtgggtgactgccttcaccagaagacttactcaaccgggacagtgccgttccggacggagaaaaactatgggaagaagccacagtactatataagggatgaccatgaaggtatcctgaacagggatgaacagatgaggttacaacagataaaggggcaccgtcttggcaatcaggccaggataaacccgcgtgggagtggaggagcctatatcctaagcgggaaggtggtatgcggggaatgcgggagagcgttcatccgtaagaaggagaagaaacaaaagggagtgtccatcaagtggagatgtccggggcaccggtcagaggcatgccggtgctttaccaatgagatatgggaagaggatatagaaagaatgtttgtaaatacattcaacaccctgaaagagcacgcggacgagatattggacccggtcatccgggggatgaagaagatgcaggaaaccaatggatttcatgaggcattgggtagcttaagtcaaaagaaactggaactaaaagagcagagacatatactcaggcagttaaaagcaaatgagtgtatcgactctgctctttattttgaggagagccagaagattgaaagggagctaagcagatgcaggtcagaggaaaaacagttgcacagtagaggtgcccaccaggataccatcacaggattgcagtccaccctgcaccagctccagggatatgatgggaagatgcaggcattcgacgatggccagttcatcctcctggttcgggaggtctcggtgggaaagggaagggagctgggataccatctgcggtgcggacttatcttacatgagccagtcatatgataggagggatgctatgtgaataactatatcacctacgggtaccgtctggttgacggatacatgagaatgaatccagagcagagtgaggctgtacaccttatctttgatgcatatgacggaggagaatccatcaaaaggatagtaggaatgctaaaagacaggaagacacctaccacccatggaagaccgtcctggtcaccagcccttatccgaaaaatcttgcgtaacaaggactatctgggagtggaaccgtacccgagaatgattgaagacgagcagtttaaacgggtacaggaacatctgaaacgctcccgggatatatggaaccagcgtcatccaaccggctccatccagggaacatccatgtatacaggacggttgatatgcagcagctgcggcggggtatattccatctataagcagagtggcaaggaggacaggaagaaggtccgatattggaaatgcaggcattatgacccggccacgaaggaaccatgtaagatgcccatcctgacagagaagcagttggatggaatgttcttacaagctcttgtgcggatgaaaacagatccgaccctgtaccatgaggaagcgaaaaagattctgaccagaattatcaaagagagacaatgtatggaatctgaattaaatgggtactggaacaaatgcaatgaagactatgaacggatggagcaactctattttcagattgctgccaggagataccgagagataaagatgacagaattgacccgtcagatagaggattaccttcggggattggatggttcccaggcaacagaattcgattcgtcgatagcaatcgatgcatctatattcaaactcatcaagaggatagaggtccaaccggatagaagcctgagatttgaactaataaacaatgcggtagtacatcagtacccagaaataaaaatgaaggataagaaatcgaaaaacatacgctactgtgtccccttcggatactggctggatggacaggaaacgccaatcatccatgagcaatacggtccaatcgtcccgatgttattccaatcctacgcggaagggatgtcgctgacagcactggcaaacgagctaatacgtcagtccatacccaaccagaaaggaaagccagcatggagccacagctgcatccgaaatatccttaccaaccctgtttaccttggggacaaggagtttcctgctctggtgacacgggaactgtttgcacaggtacagagtaggctggaagaaaccagccggatgaaacgggaaagtcagaccagggaattagccagaaaggagggattacatgccaagggcggaacgaatcgtggaggtcatcccggccacctggaacccggcggatgagtcggtccgggaaatcaggaagctgcgggtagcggcatactgccgcgtcagcacggagctggaacagcagcagtccagttacgacatacagattgagtattataccaggcacatcatgcagaatcccaactggatattcgccggtgtcttcgcggatgatggacgcagcgcgaccaatacctttcgcagggatgactttaatcagctgatgaaccagtgtatgaaggggaaggtggacatggtcattacgaaatccatcagccggtttgccaggaatacggtggactgcatctcctgggtgagaaagctcagggaaaagaacgtggccgtgtactttgagaaggagaacctcaacaccctggatgactcaacggaaatgatactgaccatcctgagcagccaggcacaggaggagagccgtgccatcagcactaacgtcaagtgggggtatgcgagaaaatttgaaaagggagagtccacaagacagagaagctatggattcaggaaggcgccaacgggagagatgtgcatcgtggaggaggaagcggctgttatccgcaacatggcccggtggtttctggacggggacagcctggaacgaatcaagcacaggctggaggatgcagggatagagaccaccacaggtaagagaacatggagcacgggtaccatctacaatatactgaccaatgaaaaaatcatgggggatgtgctgttacaaaagacgttcacagcagactacctgaccaaacggagggtgaagaactcgggccagcagaagcagtactatgtgaagaatcatcatgaggcaatcatcccgaaggcagtctattacaagatacaggaggagattgccagacgctcctcgttaaaaaaagccgggacccggaaagggaagacggcccagggcgtatatagttccaaatatgcgctgacgggcatcatggtctgtaacgagtgcggagcccattaccggaggacaacctgggcaaaaaatgggaagaaggtaatcgtatggcgctgcatcaaccgtttggagcatgggacgaagcggtgccatgaatcacctacgttaaaggaggaggtcattcaggaagcaatcatgg

SEQ ID NO: 3413 - DNA, 304 bp, Unknown
  gut microbiota DNA sequence
tcccgcatcgaagaataccggcatggctatgacaagtcccgtgattcccaaagcccaggcagccttcttgtcaccgaatttctttaccatggtgactgccagtgtctgagcgcctcctgatatctccaatatggagccgaacatggagcccaggcccacaagcagggcgattcccttaagagtacttccaattccttcatttacagagcttatgatatccgcaaagggcatacctgcaatcagcccgatggccactgcgcctaccagaatggaaatcattgcctgcaccttaaatttgatgatt

SEQ ID NO: 3414 - DNA, 1755 bp, Unknown
  gut microbiota DNA sequence
cgtcccagacgggaaaggtcttttgttatgacggtcgccacgttcccggcttcaacctcatgcagcatggcttgaagcccctcacgctcaaagctcacgccggaaaatccgtcgtctacgaaaaagcgcgtgttgaaaaagtggtgttcgtcagcatacttttgtaaaatcagtttttggttctgtatgctctcgctttccccggcttgcatatcttcctggctcaatctgcaatataaagcggtaatcttgtctgtctgtaacattttgtcctcctttccgacgacagacaagcatggtatttgtactgtctatattataccacataccgctgcctgtgtcatgtataaaatgtgaagaaacgccctatttccgggcgtttgcggggttcagttccatgtctttgcgaatgagtttttttatctttttatccagtgtgtccgttgcgcgttcacttgcggacgaacatacaaggtaagtaacttttcctattttatgctccgttgtggtaacgggcgtttggttttgcgtcaaagaaaatccccctttctttcgcaaacatataatatagtctatgaatagcagcaagtccactattcaataaaacaaaggctttaatcggacggttattagcataacctcatgggaatttcaccccggcatggttctcatgccgccctacccattgcctgcgacgctcttaacgctcggactgtggctgtaaggaagtatcattgtatattctgcgtgtcgtcgcccgcaagccgctacacttgctttccggcgcggtgttggtcgctcggctgtccgggcggggataacctcacccggatagcgtcatggcgcacccgccgtatggctcggcgcaaaaggaacgtatccgatttgccctatgctgcgccgccgttatcttgcgccgctttctttgtcaaggttcagaatggctttgctgccgcgtcagcagcggaacggaaaagggggagagagaaagcgtcccgccgccgctgcggtttattcctctgccttaaaggtgaggacagccatcatcagttttgcttgcagccgttcccgaatgtcgtggtctacgccaaaatagacgttcccgcgctcgtcgtacagcttccgcatggagaggcgggctatgtagccgctgaaatgctgcaagacaatcttcatggcgtccgggtcgccctttgtcgctgccacaatgacaggataaggaacaagggcattttccgggtagccgggttcgttaccattcgtcccattcatcagcattttcctccagatattttcttaatttctcaaaagagcttgtccgcctgtactgtatcgtgcttctcgacgtgttgaacagctccgcaatctcggtatcgttcattccctcgaagtaatacagcaatatggctttgcgcttttcttccggcaaagtacggattgcttcaagaagcagctttggcgtgattttcttcccggctttctcaaagacggtttcggcggcttcacgtttgaaatattcatcaaacgtatgaagctgccgcgcttcgtctaaggtcatgtcggaaaaggtcacttcctttgccttgtgtctgcgaagttctctatgggtgtcgcaagcttcattgtgcaataccgtattacaaaacttctgaaaagcacactgtttgtaaaactccctgctattaggttccacattctcacctcctttctcgttggaaagttggtggtgcttccccccttttcgcggggcaatac

SEQ ID NO: 3415 - DNA, 30001 bp, Unknown
  gut microbiota DNA sequence
caattcccatacggttcatcaccttctcataatgtttcaggctggatgccacgtaaatccgcgttgtctctatggaggtatgtcccagaatgtctgccagatgtgccagatttttctcgatggcatagaagctctttgcaaacagatgacggaaattatgaggaaatacctttgactggtccaccctcgcctcccggcatattttcttcatggaatggcatatattacttctgtccagacattttccgctctttgtcctgaatatacatccgctttttatatctgtatcccttatatactccttaagctgtctgaccagatttcttggaaaaataatgaccctgtattttcccttcatatttatttcagcatttccctgataaacagcctccacagtcacatatggcagttcactgattcgtatgcctgtcccgtacaaaaccagcatgaggaaatataactgggtctttcctgtacggctggctgtctccaacagccgtctgcagtcctgttctgtcagatcccgtttctcatccatatagattcttttctggaccttcaggaatttcactttatgggcctccaatcccatacactttaaatatgcgtttatggctgaaagttttccgttcacggtccgggccctgcatcgacggctgagatgcccccggtactgtatcagcaactctttgcttatacattcctgtcccataaaatcaagcatctctctcacatcatgaagatacttgtttatggttgattttgatttttcctcgtcacacaaatacgattcaaatttcatcagcagcatttccatttccataaaaccctccatttcagccctgttaacaagttgtcattgatgtcaaataggatacagaatatccttttttagtttttatattgtaaatcatatttatacatccaaaaaccggggggttattttttatggaatgaggcccatcgttaaaattccgctgtcctgactcagatggtacgattacggccagagaggaaaacataacaaaaacagctgcttacctgcgtatctatcggcccgcactgtcaaagcagctaaaggatatagcactggaagggatgctgccctgaaaacggacagaagacattctggaaatagcggacaaaacaacggatgaattcaagtcactgaggatagtactgccaggatattcgcatttttcgacttatttatatcaattttgtcgtccaatctcccttgtcaaaccacgcctctgcgtataacgtaacattggtaacaaaaaccaaggagggattaacatgaaccacgaaaaagaaatcagtaacctgcttcggcgcctcggtgtaaacaactcctatgtagggtttcgttacacaatctacggcgtcatccggaccgtccatgaccccactttgctcgcttatatatccaaggggttatatgtggatatagcggtccattaccagacctcaatcggctgtgtggagcggaatatacgcactcttatcaatacgatttggttacatggggacagaaaactgctaaatgaaatctttgattttgaacttagccagaaaccccgcaacggggcatttatagacgcgctggtaaattatatagtgatgagaggcatcagtgaagaaattacagactctgcctgtcagcagcaggcaacataaccctcccgcaccgctaaaaggccgtacagcctcccctgccggcaaactctgtaccggccgggatggcctccgggcattactcacgtacacagcaggctcacggcagccggcatatactcctttttctgccaggattataccgggtacctgctcataccctccgtacaggtctgatatatttaaaatactgttcgggattataataaaaatacatgagccggccgggagaagtatccaggcaatagcctgtatcagcataatcaaacgctgccattgcattttctattctttcctccacactccggttttcctgttcataatcaaatggcccgtgttcaaaaacaatatactcggcttcaggaatgtcatccagaagcatctgcggcggaaccgctcctttgtattcaggaggaagccgtactccccagcattcagagcgcagtattccccagtcacatagtctgccatccggatcattcatataggccatgatttgaccgcttccacagttgacctcgcttcctccgccatcgtccagttttcccttgatgctgtccagcaagccgcagaccgtctcatagtcctgccctggaataagattctgcttctgccaaaaatcccaatatccgttgctctcacggtttttaatatacaaaaatttgtgagcgggtatagtaacaaaataaattttaactccatctgctgattgaatcataccgatttctcctaatcctaaaaagtagcggtcaaaagcacttatctttgtacggagaaccacgggtttaggatttttccgatattcgctgggcgtcacaccgtatgtttccttaaaagccctggtaaaagcctcatgtgatgaaaagccataatcaaaagcaacctccaaaagattcttctggctgtccctgacttcttttaatgcaaaggccaatttcctgagctgcaggtaattcctgaactgtatgcctgatatttctttaaatttcctcgacgtataatattcagaatatcccagtctgcaggaaagggcacgcaatgtcagggcttcgtcattataacatttaatacaccggtcaatttcatcaacaattatctgaatctgctttttccactcgtacatccgtctgtttacctcgtttcaaccactctgcgattcattatacaaaaaaaatggggctgatacttgattttacttgctgtatggcgctatcttcccttcccaattataatacgtctcccgctgattattcacaagcctaaataaatgataaacaggggaaatataaaattgcggagccatataatggaagaacagttaaaacattctgccatgactgacaaaaataataaaatttccccttgacaatattctaaaagcaaggtatactcaagaagtattttttataagattttgatttcacatgtttttgtaagtcattattcctatgatggtttacaaaaatatgtgatttttttattttatttaaaatcacaataaaatattaggaggtatctttcatgaacaaaggtacagtaaaatggtttaactcacaaaaaggatttggttttattacgaatgaagaaaacggcgaggacatttttgttcacttttccggtattgctacagatggctttaagtcattagaagacggacagtccgtaacctttgacataaccaatggcaaccgcggcttacaggctgtaaatgtctgcgctgcataatattcaagatataaatggggcatatcacaatatgccgccgtaccatacctggcggggagaaatccccgccatatccagttaaagttcccctgccgtgctacagcaagacaggggcttttgtatatcaaagaggacacctgggtcacatcgcctgcttatccatctaaaaaacagcggattttgccgccatagcagaatccgctgttttttctttagaggctggcagattgtgtccggatattcaaatactccgccaccatctccggaggcaccatgttgccgcctgtcgcccaggctatatggacagcctgccccatacagccgctgagacccttttccctgatataattatccatttcatctgcatgaaggaacgcggcaaaggaggcgcatgcagaaggttctatgaatatatcctctgttttcacaagcgcgcgcatcagttcatacagctttccatcctcgattgtgcagattcctgcaagccgcttctcaatcacctttcccacaaacgcagacggccttccgacggccagcccgtccgcatctgtctttccactgattccaaaatctccaacacagaccttatcatgctctcctgtggccattcctatcagcatacagcaggcctgggtcggttccatgaaaaagcagtgaacgcagtcgccgtaaatctctttcagaccataggccaccccgcccggcgctccgccaatcccgcagggcaaatatacaaatagcggatgttgtctgtccacctggattccctgttcctccagctggtgtttcagccgttgtcctgcaaccgcatatccaagaaacagattgacagaattctcgtcatccacaaaataactcatagggtcctggtcggaactctttcttccttcctccacagccgcacagtagtcggactcatattcgataactgtaacccccttgcttctcagcaaatccttcttccactgtttggcatccgccgacatgtgtaccgtcacctggaatcccagtttggcgctcatgatgccgatgctgagccccaggttaccggtggatcccacctgaaccttataccggccaaagaactccctcatttcactggtgttcagtttccggtaatcctcattttcgttgagaagccctgcctcaaaggccaggtcctccgcatgtttcagcacctcatagatacctcccctggcctttacagaaccggatatggggagatggctgtccattttaaggaacagttttccggttataccggccccccactcctggttcagttcctgtctcatggccctgatttcccgcagctccgattctattatgccattccgggcagccgtctcaggaaaaacctcggccagataaggcgcaaaacgttccagccgccttgccgcatcctgtatctgctccttcgatactgctttttctccctgcccgctctccgggcactccctgctgttcacccagaacacttcttttccggcggcagcttccgccaataccggtatctgtttcatatatgcttctattcttgaatccataatatccattcctttctgtctgtaaatttatagtttctttgcgccctattggttctctctgaagaattccctggtcatcctcattaccaccggtgaaagtttaagaagagccagcacattgggtatgattaaaagtcccagcatacaatcctgaacagaccaaacgatcccggccgtgctcaggcttcccaataaaatcaatacgggaaacagaatgcggtaaaaacggtctcctttcaggctctttatgtacataaggctcacatggccaaaataccactggctcatgatggaggtggatgcaaacaagatcaggctgaccgaaaccacgtatttaaaaagaggagcgacggtcccaaatgcctcagccgccaatgacgccgcacttgcaccttccagaggcaccccgcttgccaggatggaaaaaccagtggtgctgcagataaccatagtatctacgaacacctccacaacaccataaaatccctgtctggccggatggtccacctgcgccgccgaatgaataacggccgcagatccttcgcctgcttcattggaatacagccccctggccacaccaaaacgcatggcctccttcattgtcagtcccgcggcggcccccatccctgctttcatggaacaggcgtcctgcaaaatgcttctgaacatgggaagtatggaatccagattagtgaacaccaccacgatacctcccacaatatacagcgatgccatgaccggcacgattttctgagccacatccgccaggcgcttaagtccgccgcctataatgaaaaccatgacagccgccattaaaatccctgtgactgctttcgggactccaaatacctgaaaggccacatccgatatggtattggactgaatcaacgttcctcccgcattctggaaaaacaggagaaccgccgcggctacgcccaacagccttgcatggagccccttttcaatgtaatacatggggcctccgtaatagcttccgtccgcacctttttgacgaaacaccagccccaacacaatttcagcatactttgtggccatgcctaaaaatgcagctgcccacatccagaacaatgcgcccggtcctcctccaatcaatgcagtggcgacaccaacaatatttccgcttcccacacagctggctatcgccatataaagcgcctggatagaggatacggttcccttatggtcccgggtaccctctgttttctctttttttggacataattcctttatgatccaggggatggacctgaactggattccgcccgtggcaatggtgtaaaacactcccagccccagcagcacaaacaacatccagttcccccacagcaggccggccagattccccagtactgcctctgctgttttcatcacttcaaccggttccttccctccgcctgcggcatatcaaatcccatgacagatgccagtgtaggcgctatatcaatcagattcatggaccctatgtcgcattttcgttctatcccgcatccctcaatcatgaaggatgccctcatctcctcaaatcgttcacaataaccatgctgggctttctgatgcagtgtttccgtacagtaatccccttctgcgtcatcccgtatttcatatcccttccgggaaaccagcacatagtcagccagtgggaaacctcccctctctatggcctgcgcccggtccaacacctccaggattccaaaaaccggatcggatgacagctccttcattatctgatccagctttcttcttgcatcctcatcctgtccattctttagccggatttcagacatcccccccgcgcgctgggaccaggccctccagtccgtcaccctgccgttcccatctgtagtgataagccctgcttccctcaactttacgttgggccggatattataccggttatccagtgtcccatggtcggataccacacagacaacggcctggtcatctgtcatactatgtaccttttcaatcagatcccccagcattttgtcaatggcctcaattgcatgtgctgcctctttgctgtacactccgtactggtgggccatctcgtcaaaggatgcaaaataggcggtcatgaagaaaggacatttcccagcctttggcgctagtttatggtccaatacccacatagctgcccggtatctctgcctgtcccctgcttccgtcaggtccagcccccctgcgtaccttccaatctccttttccatctccagaatcatgccctggggcacggacatggcatcaataaaacggctgtcaagctccgtgccgtcccaccagaattcaggtgccataaagtctcctccggcagccacagaagtgggaaaggccacgctggcagacaaatatccatgttttccggcagcctcccacaaattttccgcctttttgctggcaaaccagtgccatgcccccatatgttcccccatagggtcaaaaataccattgttataaataccatgggtggctggattagttcccgttatgatgctctgatgacagggatacgtaaaggtagggaacacactctgaactcccccgcctgcaaatgtaccattctccacaaaatatttgcttatattaggaagactgattcccagacgctcctgttcaaaaacaaactccggttttaacgcgtccacggataccagcaatacgcttaccttatttctctccatatcctttatcccccttagttttccggcttctcaacagatatgcctgcctgctcaaacggccgtatctgctccttcgatgcctcggaatcagtaataatcatccccacccggtcaatatcacacatcttcaccagagaattcacccccagcttagtactgtccgcaatgacaatggtctggtctgacgcttccatcatcttttcctgcacgataatttcatccatgcgctggtaagtgatccccctgtctaccgagataccgcaggtggtcaggaaaaatgtgtttatacttaatttagaaaatatcatgccggcaatatcagacacaaaagccatctcctcagggcggtacacacccccggtggcaatgagagtgattccctttgcatcggccagctcatttaatatggcgatggaattggtaacgacggtcagggaacggaatgtcctctttatgacacgggccagctcataggcagtggttcccgaatccagcgcgatggattggccctctttaataaagcggaccgcaaactctgcaatctccaccttgctctccagattctctctttccctggccgaaaaattctgatattggatggtccgctccccgggcatctcttccttgtcagctaaaaaagcccctcctctcgtacgccgtatcagtccctgagcctccatgttttccaaatccctgcggactgtttcgggagaaacccccatcttcttctttaaatccgcaaccttaacgcttccgtccgtctgcatcaggtttattatcttttggtaccgttgttccgccagcatccgcaaacgctcctttcttccccttaattagcttgtttgtactttttttaaccacttttaactcataatagcacacataaacacactattcaaccctttttctccgcaaaacatcacaaaatcgcttatttattttcgtataaattccacaatttaactcattttaactcacatcaacttgacttagcttattttaccacatatactgtgtgtacggaaacaaccaaacacaatagaataaaaagtaaaatcaggagatgaaaaaatgaaaacaattgcagacaaccgtcaatcaaaaaagtggatttcatttggaacattggtgctgggtgccggaaccatttataagctggggtgtttaaaggatgctttttatgttcccatgcaggaatttatgggactctcacacacacagataggtacagccatgagtgtggccggactgatttccactttcggctttctgatctccatctatctcacggaccgggtgtctaaaaaggtcatgattcccatgtcgcttatgggcatcggtttactgggcatcggcctttctaccttcccgccctactggctctttctgttaatcaactgcggcctcgccgtctgtgcggacatgctctactggcccaccatgttaaagacggtccgtcttttgggttcagaagaagaacagggccgtatgttcggtatcatggaagccggacggggacttgtggataccgtcattgcctttggcgccctgggcgtcttcgcactgctcggaagcaatgccgccagcctgaaggctgccatccttttttactcagcagtccccatggtaatcggcatcatcgcttatttccttcttgagccggacgagataaaggctgtcaatgctgccggagaaaaagtgagccgaaacaaggcagctatggataatgtaattctggcccttaaaaacaagaacatctggctggtatcatttaatgttttttcggtctattgtgtttactgcggacttacatattttattcccttcctcaaagacctgtatgcgatacctgctgttttggttggcgcttatggaatcatcaaccaatatgccctgaaaatgctgggcggtcctgtgggcggctacctgaccgataaggtattccattccgccacaaaatatctgcgcgtggtatttgttattacaggaacagccctgactgtctttgcgttccttccccacagccatatgaatgtatatttcggcatgctcatgaccctcagcatcggtgcctgtgtattcagcatgcgggccatattcttcgctcccatggatgagattaacgtacccagggaaataaccggctccgccatgtcacttggttccttcatcggttatctgcccggcgcattcctctactccatctatgggagtatcctggaccacaatcccggcctcagcggctaccgcattgtattccttatcatggccgtgtccgccggcgccggattcctgctgagcagttacatattaagtgtgattggtaaggataaggccatcaataattaattcctttaacggccagcactccctcggataccccgaatacaatgttcggggttccgtcttttttaaggacgaatccggccatgctgggtgaaagcgtttcatctcccgccgcctccactgccgccgccaattccggtgtgaatatgcggtctgttcccaaggcagccagttcttccggtgaccccgccgaaacgccgccgtccttaaatcccacatacaaaggataggaggccagggaggccaatgcatccatatcccggtctgcaacagcctcttttacctttccggcaaaagcagttatctcttcttccggcaccatgaaattatccgtatagccggttttttctgccatgttccctgttttgtctatctcaaactccagttttccataagctccgggagcaatctcatatttatcaaacacaataaccggattttccttctcattcatgtaaaacacggttttatccgtgactcctgtaaacccgccctctgacttggaccagaaagcgatgccttccttctcctccatattttccatctggcggagtatgctttcatccgcaatcctggcatagtcatggcccaggacatctgccagcgtaaccattttattatcctttaaatcaatattgtaatattttgtttcactgtaggccgaggaccagttctcagttccctgtaccgcaaaggaaagatacgcctctgtctgggccttgatttcatatcccacatgaatgttaatatcatgtgcttcccactcctcctctgttcctccagtttccataaacgccttcttatattccctggcgcgttccactgcctcgtctgcatactggctgcataaatcgtatatttcctgattcaatgcagaatccagcccatttgtatcctttgctatcatctccacgctgggaatttccaccgatattttccagtccccttcatccctctcgtaagaccggaaggtaagaatccgcgccgctgctcctatgacagggagtcctgccgccatttccgcaaaagctgtgtttgtgtttaacgccgtagtaaataccagtacaagggctgctgccatacctgcacatgttccccatatcctgtgttttctgcgtatcctgaccgttggtattctttgcctctgacttttccgcttttcctctgaccggacaattgctgccctgacccgcccggacagttccgcgggaataggtatctcctcatatctttttcttgcatcttctatctgtctcataagtccgcctcctgtatgttttgttttaacagtttcaaaccgcggtataattttgccttcaccgtattcagattggtccttgttacgtaagctatttccttcagcgtcagctcctcgaaatagcggagctttatgatggtctgcacatcctcctccagccggtttaactgctcgtaaacatcgtactcatggttgtatccttcttcataatatggtatctcctgccccattccctcctctgtgggaatctccatcttctgtttcctgagcagcagcaggctctcatttacaagaatacggtaaaaccatgtttttacggcattttcatttctgatcgcctcatagtggtccaatgccttgcagacagcattctggacaatatccatggcgtcctcctggttatggacataactgtaggccagcctgtaaaatttctcctggttgctgacgatatagtccacaattctgttatataaatcttccttcatggggtttacatccctccttgcagtgttgtttcgcggcacatcatagcggtacatctttgctgctgatatatagattcttctttcgtcttaaaagttgcatatgattaagttttttaaccataaaatgcagtcagggcaggaatccgatgtttcaccgattcccgccccgcctggtacctggcatttactgccccattctgttttatgtccattcttaccggaatgccgccatatgttccgacgccatccgcttcattggtttgactgagtacaggcagaccgccatagtcagtatatccgctgccggctgtgccagataaattcccgtgacacccattattccgggcaaaatcagtatgaatgggacataaaacagtccctggcgtatgacggacaggaataatccatatctggaagaaccaatggtttgaaatgtaattgtcatcatgtagcacagcccaaaagccggataaagggccacctgggaaatcaaaagcctgacaccgtaatcaatgacagccggattcctgttaaacagcataatcaacggcctggccagaagaatataggttcccgccaccagcacggtaagaatcagggatgtcctcaatgcaaagcgtacggactcatgaaaccgttcctccctgttggccccaaaggagtaggcggctaccggctgatatccctgcatgaaccccatgactacatagcatccaatcagcaccaggcgctgtaccacaccgtatgcggctataataaggtctgcgtctgtcatggactttgctgctatattggtaagggatgttgccgccgcaaggcagatctgtataacagctgtaggtataccgataagtgtgacggatttgattagagtccactggggtttaaaatattccctctttattttaatgatggaacgtccggataggtagaaccatcccaggataaaaaatgtgacaaactgtgagactgttgtggcaagggaagccccctccactcccattgcaaacccccagtcaaacataaagacagggtccagcaccacattaagagcagcacccgtcacaaccgcgatagatgagatctttacagatgactctgccctggccgcgcagttcatactctgggcgggaagattggcaagggccgccacaaacatccagaatgcgtaatccccggcctggggcagcacagcttcagaggctccgaaggcccgcagtaaaggctccatgaaaatgatacctgccgcacatagaaacattccaatgaatacagataacccaaccacggatgtgaccgtcctgttagcccccatcttatcgcccgctcccagttgtctgccagccagcaccgctgcccctgccgcaaaaatattttccactgaaaccatgatgagcagcagcggaagggtaacgcctacagctgcaagcgcaatatctgaaccaagcattccgatgtaagctgtatccacaatattgtagacggcctttgccaataaggccagggtggccggaactgccagcctggtaatggccctggagggcttcatatcacccagtatggattcctgacgtgcgttttctttcttcatatgtccacatcctttcgttccaccacaccatggagaagcacatccaatgctctcctgcaatcctcttcatgtgtcttgaaatcaatctccctctccccggatgactgatactttgcattgatataatcctgaaactgcaggaatatatccaccaccgtttcccgtgacaccccgcccctgagcttaagaggctccaatatccggttcaatatagatatattaaattcatcgaacccggatttgcgctgcctgacggctgattccagatgggccggcggcatgataaccgcctcgcagaaaatcctgcggtacatgggaaatgcctggaaaaattcaaacctggcatcaaaataaagctgcagctgtctgtggacggtttccccttccaatatcagcttttctctcagatattccgtcaaagccccaaaacatccatccacacaggccagatacagctcatccttggtctggaaataatggtaaatgattcccttggacacaccctcacagctgcatatattgttaacggaactggctccatatccttgttccgcgaattccttcagcgcgctctccataatccggtgttttgtctgttgatttttctcttcccgcttcatgaacattcccctccaaaattattgaccactcggtctatttatgattaggatatcacaaattgactaagtggtcaataatttaaatctgaaatatttataatctgctatccggtgcaaagaccgtcagtctaccaccgccccttccagggacatcacccgcagggaagatcctgcccatgcctcatcatacagtattaccctggcaaaaaggcactctggagccgcctcacaagccgcagcagtattgcagctcatccatgctgttgtttttagcccagaagctgctcaaacgctgctgtctgcatcggacggtaatagtaatagccctgggcgatgtggcagccaatatcctggagtacttttacctgtacttgggtttccactccttcgcatacgacctccatccccagctccgaggccatgttcaccagattttcaatgacaatctgctcccgcggtccctgaagcccggcacatacaaagctgcggtccagtttgaggacatccgccctcagcctttgcagctgccccaaggaggaatatccggagccgaaatcatctatggcaatctgaaatccgcgcatcttcagctccgtcagggcggaggacacactctcaggtgcatcggcaatcgcactttcggtaatctccacttccagcagatgatggggaacctggaaccgatcagcaatttcagaaacctggccggcaaacccgtcatgtccgaaatgcatctgcgagaaattacatgagactgtaacagcgggacgtccctcatccagccatctgcgtactgtgcggcatacctgctcaaacatatgaaggtccactcggacaataagacccttcttttcaaaaaatggaatgaaggaccccggcataagaagcccctgttccgggtgattccagcgaaccagggcttcgcagcccacaatcctgcctgtatccatgtccacctttggctggtaatacgcctcaaattccccctgttccatcgcggaggccagccttccctccagcccctgttcaaacagggccttattccgcatctgctcatcatataggaagcagcttccgcctgccgctgtcttagcgctgcgcatggcatagttcgcaaagtcaagcatctgtttcatgtcgttagtctcgccggcatccgcctggtaaacaccaaaggataccgcgatctcataaggtatgattcccctcttcccacgccacttgttcagcaccgcctggatatgcatcaaatcagcagcaagcgtttcccattgtttgtaatgcctgagcatcacgaagttatcagccgaaagcctggcgcagcactccctgtcctccattgatttctgtaagatactcccgaatgcgcgcaggacttcatccccctcctcaaagccaaaggtatcgtttatcagcttgaaacggtcaatgtcacaataaaccaccgcatatttccccgtcgccaggagttcctccgcccggacataaaaacggtttatattatccagacctgtcagctcatcccggtagagcaggtcctggatacggcgcttactgcgggaaatattaaacaggttgatgcacagcagcaggatgatgctgccggatacagctgccacaagccctgttatcaaccagatattctgatgtacaaacgcttccatggtaatgggacggacagaaacggagttgttcagcagcagggtatcaatctcttcattggacatatactggatatatttatccaatatggagaacaacctggggtcggcagatttggatacgccgatacagaggtcgtttgggtactgggtcagcgcagtgacatgaagcttttcatatttggggtcgctgattatgtaatttgccgtctgggtattggtataagttgcctgagcttttccatccaggactgcatcaaaacacgcctgtatagaatcgtaatattggatttccttttccggattgttttgggcgacatgttcagagagctgatacccctcaggaagagccagcacctctatctccgttctttcagcctgggtaatcattgcactgggggtattcaggaaacgcagtgtggtgttcatatgattgcgctcatcccacagataatctccatccacaacggaaacggcatccgtctcccccagtttcactgcacgtaaggccgtggctgcagggcaggcttcaaactggaagtccagcccgctcttctctgcaatccgggcaaaaatatctgccataataccgtttaactcgccttcagcatctttatatgagaaaggggcaaacgaagggtcgtaagaaatatgtatcggctcatccgcagcctcgatgtattcaacttcttccttggttagtaccggaacctgattggagcttggtgagagatacttgtcataaaggtccgtccgataatcaggattgcgcagaagaatgtcattaatggaccggttaatctgagccaaaaggtccggacgctgtttcgagaccgcaatgtacattggggtcggggcaaaccgcgcaacactgcggaacacactgctgcggcccaggtgggtaattgccacaccatccagggtcccgctcccaagcgcgtccagcagttcctgcgtctcatcatattcaatgatggtgagcgcaacgccgttctgcgcacagtagcgtttgaaactttcgccatcctcaccccccttaataatgcctaccctcatgccctggaaagcgtcaaaatcctcataattgtaacggttatcatccatccgcacattgagggtagtataaatcgtacacatggactcatcggtaaataacatctgatccattctgccttccgtgcggtatacagcaggcagaatgtctatcctgccatcaatcaaaagctggaacgcttcctgccagctgggggaatccactacctcgtaagatagtccactcagttttgagacttcctggaggaactcgaagttataaccttcatactccccctgcgcattatgatacatgtaatcgccatcttcataatagcctacaagcgcggcagaagccgtctccgctgcggatacgtccagagggaacaggaatacaatgagaagcacggctatcatcaatatcccattcatcccttttacctttgtctgcatatgaattccctcctcaacggctcggctccattattcatacaaactgcatctttcctttttgagctttaaggctattttaacacatataccggccaaacgcaatttgatgcatgttgaaaaaacctatataatataacgatgcctgtatcggcacaatacatctttcaacaaatggctatgggaacacttttactcttaattatgaagatgtctgccggggtgtttcacagatatccggttgttcctttttacttttctaaaaattattatgcagaaaactttgtttatgctataattttttattagggatttaaaaagattctttcgagatttgactataaaaggagaatattatggatttaaccagccttcggtactttgtcgcattagcccggaatcttcatttcaccaaaacagcacaagaactgtatatttcccagcaaaatctgagtcagcatataaacaaactggaaactcactaccgtaccccattattctacagaaaaccaaagcttcaattgacgccagcgggcaaagccttgtatgactcatgcattaaaattctcacagaggaagataatatctcacggcaaatgaatgatatcattcaaaataatgtgggttctctttccatcggagcaagccagtaccgtggccagtactggcttccgctcattcttcctgactatctaaagtgctggccaaatataaatgtgcaggtcactatggaacggtcggaaaagatggaacagcttcttgtctcgggggacctggactttttcgtaggaatcaagcacggcgatgattccctgctccgatttattccgttaatgaatgacaaagtatatatggctatcacaagggagctgatggagcaatattttggtgaagagactgatacgattattacaaaatgcagcaatggcaccaccctgaaagaatttaaagaggtaccatttatgcggttgaaatccacttaccggctccgtatgctgactgacaagtgttttcaggctgtaggctataaaccacggcagattctggaagtggaatccatcgacctgatgatttctctgttcccatatagtctgggcgcctttttctgcacagggatgcgggttccatcgctcaaaaccgcccatccaaacacttactttttcccggtacagctgaatggaaaaaccttgctcaatccactcggcattgtataccataaagaccgttttcttcccagatatgcacaggatttcatggagcggttaaaatctttttttgcatcatttgaaaattcttcctgttaattattaatataaaggaaaaacaaatggtgcccatataatataagcggcggcaaaaacagccgccgttggcagtcctgcttttatataatcgctgaatcggtattcacctgcttccataatcagcgcctggattccggccgccatcggagtagaaatagaaagcgtggcgcctgccactgtggcaaccataatggcagtgggattgattcctgttgtacaggccacagtagccgcaatgggcatcgtcagattgatcacaggtatattgcccataaactgcgtcatggcaaagggtacaagcaaaaaaatagcaaccagcacatattcactttggctggagtttgttgcgaaaaccagtttttctacaatccagtctgcaattccggttttggtcaacgcatttgcaaaacccagacttcccgcgaatatacacacagtatttaagtctattgctccaaatgcttcttttccactcagcacgccgctgacaatcatcagcaatgcgccgatcagaggcgcatagtgtgacggaatccccaccagagaactgataatcattgcagcaatgctgccaaaaaagattccaattcccattttatccttaaattcagaaagattgcagttctcgttcaaaataatctcttcctgatttttgtccccattttctttttgatttgaaataaacttatagccaaataatccaataaaactgattgtcactatcaataccggcaatcttgcaatagctgaatcaaataaactcatacgtacagatgaccccatcatctgtaaatacgaatttccctgttccataaaagctgcccccattccaaatggcataattgcaaaacccatacaagctgcgtccataacaggcttcagcaaacgtcttttctgaaaattccctttcctgctaagcagggataccattggaagcattgttgcccccgctgctgtggcactggtcagcattgcaagaaaagaggcaatatacatacaaatccatctcattttcttctcactgctgccaattttctgaagaagcttctgtatctttataataaaacttgttttcataagaccggcgcctaaaatgaaaatcgaagcaaacagaaaaaccgttgtgtttccaaatcccgcccaggcttctgctgatgacagtacccccgtaatctctaatgcaagacagcaaaaaaccgctgtcattccataaggaatttttgcccagatataactaataagcataaaaaatcctattaataatgtaacctgaatatcccccatttttctcctccctattatagtttcgctttttgcttttatattttaaatttttccttttatattttagatttttccttatacagaacatgcagacactccgctttttcaaagccgaatgtctgctctttcatctcagttattaataatcatacatacccaccggttttctgtccggcttaatcgtatcagtatatacgggagctgtttcataatcaatatccggtataggccaggttggctcttttccttcatacatctccacaattcccattgcagccatgtaagaagcccgcattgccgcttccaccgtattgccgccaacatgcggagtaatcagcacattatccagagtgatcagcggcatatccggaagaatgggttcgtgcacaacagcgtccagcgcagcgcctgctattacatgattcttacaggcctcatataaatcctgttcattgaccaccgcgcctcttgctgtattaatcaggaatgcggtgggcttcatcatcgagagtgtttctttattaatcatatttcttgtaacagaggtatttggcgtatgtaaagatacataatcactttctctgaaaatacgttctatatctctgaccacttcaaccccctccgggaaatcacatgccggcttatatggatcatagcaaagcacattcatctccattgccaggcagcgtttcgccgtgcggcttccgatatttccacatccaatcaaaccaacagtctttccgttcagcgtagtcatatatgttttcagttttgcatcgtaaaaatccactgttaacatatcgcgaagacgtgttacatttctgctcatatacagcatcagcataagagctgtctccgcaactgatgtgctgttcgcaaccggagcgtaaaggcatttcactccataatccgctgccgcttttaagtccacagcgtcatatccggccccatggcgtaccagaactttgagattcggcgcagctgcttcaaatacagctctgggcattttcgtaattcgtacgataatggcgtccggcttatgctccttcatgtccgcaattacatcttccgtttcaaatccgcggccgtcaatcaacgtatgtccatggctttccagcaaatcgcgtgcatctttttttaattcctgtggtaaaagaattttccaacccataatttcttcctctcatttcatgattcttcattattcttagcaaatgcccatgattttccaatacggaagtccgataataaggaataccgcaaaaatcatagctaataaaatggttcctttcagataccagtctttctggctcacataaccatttccaaaaatatagatacttgcaccgtttccgtagttgcacaaaagcgcgccatatccgccgaaaaacgccagcatcaaagacaatgccattatatttacatttgtggatgccgccaatgtcaaaataaccgggtaaatagaggcgatataggctgcattggacacgaagaagtactttgtaacaaaacttattaacagcagaatcactaatacagccattccattcacagctgagagatccagataattttgtatctggccagacagccaggaataaaatcctccttcattaattgcgccggatatactgaaaaatgcaccgtaccatatgtacatgttccatgcacccttttccgccatcaagtcattccaatccatgaccccaagcagcagctccaatgccagaaaagcaaatgcaaccacatacatactgattccaatttttcccccgagcatccatcccagaatcgccatgataaataatgccagcagaattttctcgtcttttttcattgcgcccatttcctgcattttactgacaacaaagggtttaatatctcccaaatctttcatctggggcggatagagcttatacacaaccagcgggcacaaaaacaaaacaatcagtcccggcaccaatgccgccttaaaccacagcatccatgtcaattccactccggcaatgtctttaatggttgaggcaatcactgcattggatgccattcctgtcagaaacaatactgctgtggacatggcaactacatgttccagcagctccagatatcctcccagcttttgcggatccttgtccggataagaacccagtgactctgagacgccccggaaaataggaaatacaatggcagaacgggacgtattggacccggtggccggactcagtattaaatcacaaagcatcatgacatatccaagacccagagaggatcttccgaatttggttcccccaaatttggaaagcaatatgtatgcaagacgttttcctaatccggttttcttaaacgccccgcaggcaagaagcactgcaagcaaaaaccaaactccctgggcagcatatccgctgtacaaaacagctggtttttcaacaaagcaggccccaagtcccaatacaatcaggctgattaccggctctgaaaaaggtttcaaaattaatccgcacagcagggacagacacagaccgaacatatgccaggtctctgtctccaggccggcgggagcagagataagccatgtcaggagcggaaacaaaactaccggtatcatttttaccagacgatttttcatctgtttctcctcctcttttagcagttataaacgtcatctataatctctacatttttcttttccatcaaatcttctacccactggcgattcacagtcccttttgcagaattctccgctttctgtttatctgccgctgagagtgtcctggctttttcaagaatctctgccgcatcctgtctcggaataacgattacgccgtctttatcgcccagaataatatctccggggtttacagtaatgctgccgcacgcaatcggaacatttacctcgccaggaccttctttataagggccggccggattcgttccagttgcataaatcggcagatgcccttttgaaatcacatcaatatcccgaatcggcccatcaatcacaattccggcaatttttttgaaaccctgcatgtaattatacatgatttctcccataatcgcccggctccgctcgccctcgttggaaacaacaatcacatcgcccggcatagacatattcattgccttatgaagcatcatattgtcaccaggccttgccttcaccgttaaagccacaccgcacataattgcttcagacgggtttgacatcagtctgatactgggattcatgccgcataaccgtcccatacaatctgctacatttgctgccggtaatttgctgaattcttctactaaatagttatccggtaaatttctctttaaaaaaacacgatttccaactgccatttccttctcctcctttatcaatgcgtttccaggcaaagtgttgttcctgcctgaacaaaatggatatccgcatccatcatatccgcataatataaaatcattccttcaatcgatctgggaatcacctttgactgtccggaatgagcaaccaccagccctgtaacctcattaggaagcccgtatttttgtgtataataaccgctcaaaaatccgtgctggtaaatcttacccagactgctcttcctgctcgttttgcttccctggtcacccatctccatttcttcaagcttacatacatcatgcaaaaccgcagcaaggattaaaatatcagtatcaatctcataaccatatttttcaacggtatttcgcgcaatcataagcgcattcgctgtaacactttccgtatgcttcaccagtgccaccccaggagcacgggttgcaaactgcgcgtccgctatatcttcccatgagctgttttcaaatgcttccacccagatttcagctgccttttttgcatattcctgattttttatctctgataattggggaaaatatgatctaaccatctcttctgttattttggtcatattgaacctccttctgtttcatttaaaatattcagcatgctttttattttctgatatcattatatattcttttttaacaacagtaaaacaaggttatatttatttttgacaacaaatcgttgtaaagaatatggatttatggtggttttttattgtatatattgtgcaggtttgatggattatatggcggagattaaggaatgataataaaagaaatgcctgccagcgaatatgtagtgtttcatttcggggctaaaatgccaagacagtttagagccagttgccgataacatttattaaatagggtttccgcaattgacttgtcagttaaatgaatccgcaacatatgtttttgcaaagcatggtgaggaagtgggtgaagaagggaaaagcaaaatagagtactgggttccgattttacagacagcaaggtctgtaaacattgaaacgaaaaatgaccgccacgttagcgacggccaagtaaataattactcattatgatagattgtatttcctttttatctcaactatttttcacctgtccgccttttctcttggtatagcttaaatgagattctttctaaggtagacaatcatacttttgtctacctcagctttgatactaatgtatcataaaagatttccacattaatgggctttgccaaatgtccattcatcccggcagccaatgcatgttccacatcctctttaaatgcattagctgtcattgctatgacaggcacacgttcagcatcaggatgactactggcacgcaattgctttgttgcttcataaccgtctataacaggcatttgtatatccattaaaattaaatcgtaatagccaccaggggatgcaaggaatatatccagcgcctcttttccattttcagcacagtctatctcggcaccagtcaccttaaggatttccatggcaatttctctgtttagtatattatcttctaccagcagaaaatgtctgcccggaaattccggaggaatgaactgagatatctgttctggctcctgcgcaagtatattctttgtcagcgatactaatatgtcataaaggcttgattcaaacaacggttttaagataaacgcatttgctccgtctgaccttgctttgtcctcaatttcagcccaattgtaggtagagattataatgtctggtttcttcggaccaatttcttcgcgaatacagcgtattacctctataccatccacatttgacattttccaatccataatacagatatcataatcctgtaatgctttgtgggcattaaacaccctctgtaaagcctcatgtccttcacttacacagtctgcatgaatacccattctattcagaagcatggaagcataattacagttgtcctcatcggggtctgcaaccagcactttgagaggctcccattcccattttttatgttttccttcgtttggtacatcgacaggcagaacaaccgtacaggtagttccttcacccagtttgctttcaacctgtatggaaccgcccagtaatttaaccagattataagtaatagccatcccaagacctgttccgccatattttcgggaagtgccgctgtcggcctgctcaaatggtttaaatatacgtttcaggtattcatcgctcataccaatccctgtatctttggttatgaactggagatgggtttttccatcaacaacaggtgctgggtttacttccagatgaaccacaccgccttttggagtgaatttaattgaattggagaggagattaaggagaatctggttgatacgcatacaatccccaatatacactgcttccggaacgttttttataccacattcaaatttcaatccctgctcttctgcttgggcataaatggtagctacaagcggttccagcaactgttgtagttgaaaaggttcgtggtttacggagagttttccttcttctatcttagacatatccaacacatcgttgattattgtcatcagatgtcgggaagaaaatgtaattttagaaagacagtcctctatcctgttggaatcatccaaatgtgtagccgctatttttgtcattccaatgattatactcaagggggtacggatttcatgggacatacatgatagaaactctttctttactttgaaggctttttgcgcgttattaagtgcatcctttaactcctgctcctgaatagataaaagttttaaattttttttatccatatattcggaatatatactcagtaatataataccgattgaaagcagtaaggagactgacacggtaagtactgcggtgtgttttgatgtttccgtcaactcacagaccttatcatcagcaaaatctattattgttgttaaacagtcactaaccctgtcatactgaggatatacatacagcgctaaatagtttgagatctcgttctcggtatgtccaaccacaaagtctacggctttatcctgctgggcaatcagctgattcatggcagcctgaagggtatccacatcctccttagggccggaataacagctataaagcctctctatatcactgaactgcaaatcataccgttcctgaaaaatcgaacgaacattttgctcccccttaaaatcataggtcaggaatatactcacaaaacgtttcatatccaacaagcgtgacctcatccccctggcactgttgctggatgtatagggatggtcatatatattttgggcagtttcctgcatcctattggcagtatatatactgatggatgcaaatattatagtgacggcacagataataattgttatttttgactttatttctaagttcatacgctttcctttaaccttccaaagttcatcttctgcacatttttctgaactcaaaagaagtcctgcggatgtgcttttccatgcccatcatttattcgtttttctggatatctgttaacattagtgcacgctgatacctgccagttaagtcttacaggatttcgataccaaacgcgcttcgctattttccagtttaaaaccatcaactaaattttttaatgactgagcctgcctggctagttcttcgctagcaccagcactttcctcagaagttgcagtattagtctgtaccacataggaaatctgtctaataccctgtgttacctgggtcagagaggaagcctgtcgactggcggcatcggcaatgtcatccaccgtgcaagatactgtctgcgtattttgggctacttgttcaagggattgggcagttttgtcagcgattttacgccctgtttctaccgcctgaagggaaccttctatcaggactgcagtatttttcgaggcccttgctgactgctcagcaagattccgcacttcagatgccactacagaaaatccttttccaacagcaccagcacgtgcagcttccaccgaagcattaagtgccaatatgttagtttgaaaagcaatatcttcaatcacttttattatttttttgatttcggacgacttatggctgatatctttcattgcattaaccatttcctgcatctgatgcatgcaatcgttaacagatccgcctgcctgcatcgtctgctcgcgggccttttccacattcgatgccgtctcctgtacctgctctgatattacagaaatagagtttgccaattcctcgacagaacatgcctgttctgctgccccctgtgccagagtctgcgagctggcagaaatctgttctcctcctgctgccacctgaaacgcagcctggttaataagttgaagcatatcgcttaaattattacggagatttcgcattgagattagaatcccttcataatttcccatataagcttctaaggcattggaacaggttgtgaagtccccttttgacaaatctcccattatatgggcgatatcaaaaattattttcttttgtataccaattaagtagcgtatattattggataagtcacccacctcatcctttgatatatatttgacttgtgctgtttccagttctcctctagctaacttttggattgccatttctatttcctttataggcttacggacggtgttcgatatatatagtccaattgttcccgccaatataaaacttaggataataatgactgttacaagggtgatagacatttcctgagctttttgaccatcctgtaccattttctttgcattttctcctgcaatatcggctatcgcctgcaatttatccgccatttgattcaaatgtggtacataaccattcttcattatgtcgaacgctttatctttcttattagccagtattgcgtcaaacacctggttgcgataaacaatcgcttctttttgaattgattccacttcatctatcagtgatttatccccccgaaagacttgacgtatgataggaaacgtttcacgcatcattataaggctattgtcagcattctcaatcaactcttttgagatttcctgatctgattccacaatagcccttaatatatcacctcttgcctcttgtattttccttcgggctgtggctacattgactgtcacagtatagttgttgtcatagaaaatggttaaattatcgccgatgtgattaagcataatcagggccacaatacttgcacacaggcaaagaaatatgataactacatatgacaataaaagcctggttctgattttcaaatttttcaacattatattctccctatagccaataataattatggatagttatattgatatatagcaagcacggtaaccttgacgtattgcaccttgtttatatacatatttataagaatagcataaaatacaaaaaacagcaaccagcttatagataccgactgcaaaatgagtagaaatttctttttttcaatgttatactgatttaagtaatgagtttttaaatttcgcctaccaggaggtatccttttgaaagaacaactagaattaaatcaactcatttacagcataattaaaacccagattgaatttggaacttatcgctttgaggaacatctaccgcccatagaagagatggcggacatactggttgtatctgtagataccatacggcttgcttatcgccgattgcagacagatgggtatattaccctttcaaaacgtattggttctgtagttacagttcaatacgatgataaagaagtagaacagaatattcagacttattttgcagaacgagctgactctctgctcgatatatgccgttcaatcccgctgctgctaagaggtattcaggtatcaacatggaaaagtattccactggaagaattagataagattgaacttgatgccttacagactaaacctgccttttgggtgttgttttatatacagaccctatatagaacgctgaataatgacctattaatgaattttttcctttggttgaataccttttatacattaccttttttgagtctgactgattatgaaaaatatgtagacagagacatctgtgccataccagatataataaaattccgccgggaggaaaattggacggcacttcaggtcatttccaaaaatgtccttgagaaacaccagtccaatataagcagtttttataaaactagaatttctgttcctccctcaaaaaaccaaatcacatttacttggagttgttacaaaagagcatcgcagatttgttattctgtgggaatggatattttaacttcaattgcccgtgaatattaccctgtaggaagttttttaccttcccaaaaaaaactcgcaaaggaaaaacatgtctctgtcagtacaatccgccaaaccctctcattattaaataatctcggtattgtaaagactatcaatggagtcggcacgcaggttctttcgatggatcagattgcagacaactgtaatttagcgaatccaattgtaaggaaacgcttattagactgtaagcaaagcttgcaactctttgcgttgtcctgccgagatgttgcatcatttacgatttcctccatggatgaatcaagtctgacgatatggatggaacagctcattttattcgaacaattagacaaactggcgcttatagtaccgttttctttgaaattcatgagccagtccgcaccttatcagacaatcagaacattctactcagaattatacaagcaattattttggggagtcccgcttagaggtatgatgggaacacaggaagttatcaatgatatttaccgaccatatcatcaatctatgcttaattatctaaaaagttccgatgcagagggatttgctgcaatattggaagaggcatcaaacctggcagttcaatttgtatctgaacggctagccaaatatgggatacaggagactgatagtaagtctatcactaaatatggaaagaattctatctagtataaac

SEQ ID NO: 3416 - DNA, 3123 bp, Unknown
  gut microbiota DNA sequence
tggttccaaaacattaacttttatatactataaaaatagaggttctgtactaaatattggtgtgtgttgaaaagcacatctccaatatccctttggttgtaatgaaatctccggaaatgtttatcccatcagaaacagcaatatcttttcccactcctggactggcgtaattcattctttccggcctttggctatgagcccctcagttccccggcatgtggcacttctatgttggttttaaaagtttactgatttacgaaatttctttatcggcctcatcctccccggatactcccattgccagcagcatcagcatgacaggtgtcacgataggaacgctgatgttgactgctgcctgggcagcataacagattacggcaaaggcaattgccattacatagggccgttttccggataaacgaatcattttccggatggatgtaaccagtaatgccagataggccacaagtccggccaaaccaaccgtcaccagatattgaagatattcattatgagcgctgtcaaaaaattccccatagcgcattaccatttcatcataatggttttccatgacaaccgccccatatgtatccggtcctgcaccaaatattttctgtttaaagggaaacttcccataactttccataccgattctccatatgtaccaacgatgcgttccccagtcgtcattgatcgtcaggtactgtgccaatccgccgtagttccctgcatttccacagacattcacatcataaagggcaaagccggtcaggataattcccacggacaggaatgccagccaggcccacctccccttgtttccatcccgcataaggggatgggtgtccggaatcattttcatcatccaacacagtatgaagtacagggcccacaggactgccaccagaagaatcaggtaatgtgaaccggttatgatacggtacaatcctcccatttgaccggcagctcctgattgcggctttgtcatcctgtgcaagctccagaattccgaacttaacactgccagtataaaaatgtaggttctgacccccctcaggtttttgaatgcatacagcggtaaaagcccaatcagagcaaagattgcaaggtaggcattatcactcatcccggtaataagggcagcgaatgaaatcgacatgcagaaaagataccatgttttccttatccggacctcctctataaagaacaacaggacagacgctccggccagcatggctgcataggatgtatatgtattaatgttgccaatggttgacgtaaacatatagtattgtccagggtccataagattcttaaatccaataggatctatatcgaagtattggaggattcctatgatacacgcccccatgccggctccgagaaacaggtccagataccattgtcttaaacgcagactccttcttacggcaaaatacataaaagcataagcaatccatatcagaagaccagaataccttccatcatttcccaacaatgctgctgcgggagttgcggattgcagagtggatataccggctatcagtataaaatccagcatggaccagtcagaggcgcagattttccttctcctgcccgtactcctgtcacagcccagatagattgacaaaattaaaaaaattacatttaccatcagaaatacaactgcaaagataatcactactttgtaataaaaaaatgttttaaaattcagtatatcaaagtaatagtccctgaacgcaaggggaaacacccctattataatgatcgcaaaaatacctgccagtccggaattcatccctcgccattttgaataaaaacttttaatatttgcaatactggttttcttcccactatccatgactcccccctttcaggtaattccagaagcagccatgactgataccatggctgcctccgttactccttcttttttacatctttaaatccttatttatccgtttttggcacatataggtatttgcctcctccaacattctcatcagctccagcgcactgcgaaaagcaatataatgcgtccctgtataattgcaccggagcctcccctgcatagaggaattctgccggaacaacacatggatcagaatgacctccttcgcagctgttacatatgggtacaggttccctgccacttcctctttttccagaactttcccggaacttttttgccgtttccccctcagcgccctgtactgctgctccctttctttttgcaggaaccgcggttcggttgttgccataggggcccccaccatttcacacacctcatcaagggccagtatcagcccgtggattcctctaaagcttacgggacaaggcagatgataatttacaatgataccatatggcatattattttcatgaccgtttatacacacaagcatcatacacgccctgtccgtacctgccatttcaatctgaaggttcctttcctcactcagcatggtccactcctttgcagtacaaccgcagacattgttttggaactttattcgccgtttttacggtgtctccctcatccatctgccgttttcatccaccatatatccatcaggggttatttcatttacatataatgtacccatcggctttccgctctggcttccggtactgaagaaataccagtactcgcccagcttctgccatcctgttgccatacctccggtaaactgattcagatagtaccacttcatatcctttgcgtcatagtaccagcccatgactaaacgtccaaagtcagccccctggtcctctttaagataataccagtgtccgcccgcgtccatgtaccatccgtaatccatgataccggctgcgttaaaatgataggtacaggtctgccgggcatccttgtacttgatgtttatccattggtctttgatgattcttccgctcctcagtataaatgaccattgtctgccatccgtgtcaatgctttcccatcgcccttccgtaccaatggtgtatgttctgtaatcgttaaaggtatttcccggtccaagacttctgcccccgccggaacccccccgtgagccgccgccggaacccccaccggaacccccgccggaacccccgccggaacccccgccggaacccccgccg

SEQ ID NO: 3417 - DNA, 26564 bp, Unknown
  gut microbiota DNA sequence
gggtcatctggattgttgccgccggaagtaatggagtccacaagggcttttaaagtgtcataggcttccaaaagctcatcaacagtcgggcggtagattctgttggcaacctccagggcaatgtcaattgcttcgcttaactcctccctgtcctcttcacttaccgactgattgttcttcaatacctgggcaatggaaatctggtctaatagcttctgtcttgcttcctgccactgcgcatcatcttccgtctggtagagtacatgcagggtcaggttctttgtaaccggctcgcctgtgtcataaccgttacccgaagaggcagtctttcccagccccttatactcccatacaattccggtaatcggatccgtatagtcctcaaatatatccagatccatgaatccttccgcgtcctccagggctgtgtcggacctgaccttaattatatgttccatggaacgtttatcgtcaatgatttttacctcatgggctttcaggtaggtcagtacataggtgctttccacgtttgcatcaaaggagacaactcctgtaaaaccggaatccatatcatccggagccggctccataggcacctctgtacatgtatattccccatccaaatcctccaagttccacagatggtaatccgtatagccgtgcatactgcggtcaaggacagcgtacaccctgatatccggttctttattcacatcggacggaatctccttattgctgccgcccacctgtcttgccagtacagacgataatgtccagggtacctttaccgaatcattgccgacttcagattttaccgcttcggactccgatgccttgggcgcgcgctgggtgaacttgactgtgtaaagtacgtcaacccctgctgtcatagcatcctggtcactgctgttattagtcagttcatcaattaaatcctccatcctgtcatctgacaggtcaagggccacagcccctgtcttaggggtataatcaatagaagcattgccgggtgttgctgccgccgcagcataatagttcgcctgaagcaccagattcccttccggcatggtgatagcagggtttctcctggtcttatcggccagtgtcagcttgccaatcagcgcgctccactgccggaacccctgcccctggctgttggtggtttcagcatccaatgaaattacatccccggcctttaccactgctgttttatcatcatcaaagtcaattatggctccgtcacgcatgattttagtgataaaaccgccgtttgtcagggctatggtataatcctgctgttcctgcgtatttcctataaccgcaacctgcgtacctaaaagaatcttatcggcagcggccgtgtcctctcccggctgttttgcaaccaccacatacagctggtttgactccagtcctccaagtaccgcacgaggtgatgcgccggaagacatgacccatccgtcctcatcggccccgggtacatctattacatcgccctccatgttaaggattgcatacagggtttccggatttgcaggctcaaccaccacctgcttcataccagccccatcatcttccacatcatagttggtgccgagagcgggcactgtcacacgtgaaggcgggctgaaggtatccgggtccagatgttccggaaggattacgcctatatccgggttagcgctctggttaagctcatagacatagtagcttgtacatggatttaatccggtaaacccagtgttttttaactggcttcccagtttggttccaaccaccctgtaatccatatcagtcaatgcgtatctgcggttttcattggcgccggatacgctcactttcccgcttccatcgctgtctacggtcccccgggcatccggcattgccaatatgttgtcatcactgattccaatagggataaaccttgcagtataggtctggtctgcattgattgtctgtgcattctgcatccggtttccattctcgtcaaaccagccgccaaacatatagaaattatcaggcagggtgctgggaagtgccagggatgaccaggatgtccctatttccacatggcttgtcctgctcccctcaatggtaccgtggggaccggagacaaatttcagatcaaaccattctccttctgtttcctcaaaattcgcgaacagtttaatggaggcattaattgcagtgtcatctgccagcttttgtcctgttttattacttccgttggatgtagccttgtaccagccgtcaaaactgtagtgaggtgaaggagttggcataagcccttccgttacctgggccagggtattgttttctgactttttaacaaacttaggggctgtatttccattaaaggagccattctgtccattgtagaattctacttttgcccaatatgtctcatccgtcagctcttcggtgtaggtgatagttacagttccaccctgaagatttggggtcaggttcagtttcttagtctcctggtccagggatacgtctgacagactgtcttcccatactatattaggaggataaacataacctgacattttatccacatcaacttccaccggtactcccggctgcacggcccgcgtctcctcttcacgcagtatattgccgtggttatccatgcgtttcacccgaagtgtggttacaaagctgggatccagttcatattgataggtaaatgttatggcctggttcggcatcttacccgtaaaatgatagttggaagtattgagactcacccctgcatcctcagcggatataacacccgtcccctccagatccgtaattccgccgtccgtcagttccgctgatgcaatcagataagaattaatggcagccggctcaataacataatcagattccaccggaagggttctgctctccggggctttaatctgattgccctccatatccacgtaccgtacagtaatcaggaatttttttgtcggatcaggttcataacggtaagccgctgtcagataatcattgggcatactttcccttaccgcattggtggaagcgttgatgcttgcccctccctctgtcatggtgccatgtccgcttgcttcgccgtatttgcggactttattattctttagaagcacggacttaaaccgatatcccggaatatcccttctgtatgttgcggagatgggattattggccatctgggtgctttcccaggttgattcaaagaattttcttaaatcaggatcatcataatcccccggccacccgctgctgtcatccgcctcatctctggctgtgttaaaatccctgtaatgttctaccctgaacgtatatggggtggtttcatttcccttccacaccgcgttgtaggttgttacggaatcatacgggaaagcataagggagtgtctccacccgattgccgctggttccataccagccgtcaaatgtatagccgtcccatgtaataccattaaaatccgggactttcggccttgccccggaaccgaagtcatctgtgggcagtccggcaaagttggcagaactggtcagaggactcccagcgtgtccatctgccacaaacagatttccctccatagccccgccggatgccacgctgctataactggaaagctggactcccggaccgttttggggatcaaatttaagcttaaccggatccccaaaattaaccgcatacgccggatatcccggggcagccatggaaaataccatggctgccgccagcatccctgccagctttgattttatattatatctctttctcatccggttcctcctactgaatccatgcaccgtcggtgtctgtctggtatccgtccggtgttatttcgtttttatacatagaacctaaggggcgtcctgtacctcccccatagatccattgctgttttgcggggtcataggcatatacgcctgcccccaccggggagaaataataccattttccgtctatcttcctccacccctgggccatcacgccgttcaacggatccagataataccagttgccgtctcttgtatccagtctccagcctgtaaccatctttccataaggagattccttctctgtattgcagtaataccattttcctgccttgtcacagatccagccgctctgcatgattcccttatcgtcaaagtaataccagccgctgtctcctgatcggcttccttccgggtatttcagcctggcccacatgccgctcaggcttgtgcctccgttgaggacaaaactcagctgtctctccccggacggacccgtgctttccacccagttaccgttggttcctatgaggtaactctccggcgcggttccggcaaaaggcgcctgtttgcttccgcctccgcctccgccgccgcccttgcttccgcctttgttgccgcctttctgctggtcgtcatagtggtcataacggttgtctaacagttccttgtatggttctgtcttgtccttcagttcaaaaagcgcctcctccagctggtcaatggtagccttgggttcctcgcggtccagtacttctaatgccgcttcaatgtattccttcagcttcttactctcaccaagcttcaggaaatggtcatcgcttatgccgatggcctcacggatagcctcttccagctccctgcgggtgttgtccacctctttttcattatcgtcatagtacgcatatatatatgtcttgcgggttatgctgcggtccggttcaaactccctgtaacggtcctggcggtagctccagcccacgtagctgtactctgcccctgccgggctgatgaaatagtcgagctgttcctcaatccccgcatactcggtctcataataggaatcaagaggggattcttctttgcgcaccttgaaccagtaccggtagatatccggagccgtattgttcaggaaatacagccggtaagcacggttatacaccatcacatacctgcttccctctgtggccgtgaacgtgaacaggccgcctgtctcttccggctcgtagtccatgggtacaaggcttaccgctattcccgtgtcatcgtcctcttcgatttcatacagctggtaatccatcatgtccacatcgcgcttccccagctgtacataggtgttaaaagatgcctccgacgcacttgcacggttgactttcctgccgttcacatatctctcaatggatacgtccagtccccaggccgccttataggctgcttcatggtccgtatcgtagtcgcctcccatcttgatggcattggattcggaagcgcgtacattgttctttctgtaaaccaccttataggtcacgtccgcatggttcacgtccatcagctcccggtccgcgtccgtggtcagttcgtcctccagaaccggtacctcgtccggatccagggccagctcctcacggctgccgccccggacttcatccaccacaacagcgttgctgggggttgccgcccgttcatataccgctgtcagcaccaagttggtgtccggcatggcaaagctggcttccctggagttaatcttggtatccattccatccaccgctccgatggtgaacttccagtgtaagaaaggacggccctcgtcattggttggttccgctttgattttcacccaatcgcctttgtgggcctcctcgtaacggtccgcgcccacttctatatcacctgcgctcaccacctcaccgtaaattgtctggatgatgtagttcggaagttccagatcccctcccgggtccgtagtgataatacttccattttcctcgcagctctccgccgtgatggtattctggccttttggccgggccaccaccgtatactccctgttgtaatccagtccgccaaagcttacgcttcccgggtttccggacacactctgccatccgcccgcgccggtttggggcgtcgccaccacatgtccgtcgctgtctaataccgcgtagtcggaggccgtgtccgcgggccgtataatcaactctgtcttgccctcgtcttcctcgtcatagagaatcttataattggtatccaccaccggcgtcagtacctctgcaccgtcactgagggtaccctgcacatcccctatcatgtctccggtccccaccccggtctgtccggtggcctcatataccacatagcgcatgccgggatacaggttgtcaaatacagtgcggctggtgaggatattgcccttgttcactgccagtacctttccgtccaggtccgtaagtatatatttataaccctgtgtggttccgaataccgtaatgcggccctttccctggccgttaagtcctgccgccggttcgggctccgctacctccgtgccgaagatagctggatccggatagaactggatggtataagtctggccgttcaccaggtccgtatcatcatccacaggctctccctgtacataccagtcatccaccaggtagttcacctccggcgtgtactccggaaggcttgcctcaatgtctccccacttcttatcgaatgtagtgcgcagggtaagaggctgccctgcattgatagaaccgtggctgcccgccccaaaattaatatgaatccaggcatccggattttcctcaaaatgggcggttatgactgccgctgccgtaaaccggtaatcctgaggcaggagtgtctccccattgttcagaaccccgtccccgtctgtatcaacaaaccatccgccaaagcggtaataattattctccggctgcggtaccggcataagccgtttttccttgatggtttccagggtataggagttctcatgccccggggatacgccatcgtccaacagcacgctggccttgaaccttccgcccgacagggcctgcacatcctgggatactccgcttccgccctgcagggttccgttaacgccaggcttataagtaatatccgcccacttagatggaatcctgtcatgcctatacgtaattgtggcgtcatcgttgggcatgattcccgcccatccgctgtcatcaaactgtatctgtgtaccggcaggccggaccgtatgggattccaggctgtaaccatactgctccagatagtcgccctccacactgctgtccgcctcgaaagggcctgatacttcaggagggatgatatcttttaagctgctgtcagccgttccgttatcctcatatttaacagttatcccatatccctcgatggttgattcatacaggtagacaagacgcaccggctggttgggcatgataccgttaaacgtaaagctgtcatcaaactctcctctcacaccattcaccagtccgtccgccaattcacccgcctcttctcccaggtcaaaccggtagccggtacactggtagccgtaaacctgcgccggctgtgcactgatctcattctccggataatacagttcagactgcgcagtggataccgtggtaccgttattggtctgatgcagtacctcaaatagggatctggcgcttgtatccccataccgtactttgtaaccgtaccgtatggtcgcatcctgtcccggcatctttccgctgaatgtacccgtaccgttaaactggccgatgggaacagatgtgccgctgaaattgtattcagacggagtggtgctggaatcctcctggctccaggaataccccctgaccgcccttttctcttccagaagcggctgctccacactgtaggcgccttccagagtgttggaagcgaacataatatcgcccgatgcattagagtgctctaccgtatagttaaactttatacttgggtccgcctcaaatatggcatagtaggttacaggtgtctccgggtacaccggcggcaggctgcttatgaactgggggtgctcccagtcatttaccgcactccatcccttgaatatgtaaccataccgtgttgtagtgggaagcagtgaagtgaccggattgcctgctgttcccaccagtgtctccggttccggtgttcctccgttgctgttgaatataatctgtgatccgattttgcggtattcatagttgactgccacatcctggttcggcatggttccggtaacccggccaaagtctgccccgggtgtcaggttggccgtaagtgtgggcggggtcccctgctctatgaccacaccggccagctcgtatcctgtaatggccggtcccggcgcaagatccaccgattctccggaagcttttgagacggtgggaataggggtgactccggggattgaaccgcccgtatcagcgtccctcacagtaaagctgatctgaaggccgtttcgtttgattacggcgtttctgtcatttcccgtgccggcgcctgtcagattcttagtgcccaccgtcacatatacccctgtaccgtccgtttttgcctgatccgcaaagaaattgtccgcaaagggacttggagctgtatccacaccgcttcccgacaaaggaacggcaatttttatctcctggccggccagcgtggatattccccccggcgacgcgtcaggctgcctggccgttgtaacaccaatccttgaggtgttcaggtcacctgttaccgtgatggtcctcccctctgccagatacacattggccttagcgcctgagggggttgtattactctctatcatcacatcattcagtacgttgaatcttcctgtgctgtcaaagtaaacagcacccttgccttccgagacatttccggatatcgttccgtagttcatggaaagagccgcactgcctgttatattgacggcacttcccttgcttgtgttgtctccgtggcaattacgaaggtccgccccactgtttatttccactctgccggatccggcagataccagcggttcactgctcacactgccatttccatccagggcaagatccgtcagcttcagagttgctcccgataccttaaaaataggctcgttaaaagaaccggctcgttttagtgtcttaatataatccgaattctcattggtgggattgccgtttctgtcataatccgtgcttgctatggtaatatccctgcctgaacctgacacctcgataggggatgtgatgtccgggtaatccatgatatagatatatcccttcttattccctatcttctccaaagcatattctatggttttaaaagggctgctgtacgtgccatcagcggccgttgaatccactccggattccgatacatagtacgatgtatccctgattgcaaaggcgacacgcttatgtacgatttcatacggatgaagctggaaatgccaggaatacgccataccggagtcttgtccgcttaaggaatcccctccgtcttcattgaacacattgcttccccaattgttgtagcgtccaatccatctagtggtcggaggcgtaacgccaaggctgctgtcattggtaatacagtcaaaggtagttttcacatgctggttcaccatgtggaaaccgcggttgttcttatagaccgtggcatagtcgtcttcctggctgccgcctatcatgacgtccgtacctgttcccagtttcacggacctgccttcggttcctccccgtccggtcttgtcatacacataataatccacaaatatatatttgttatccgggcttggtgacagggcgattttaaattcaatgcccatactgcttatatcttccaccgcgccgttggtacttccattggccttatacttggtaccgttttccacctgaatgtaggtggcatacccctgccagctatatgtagtcttaattccgctttggctgtatcccgtctgtccggcctgtaatccgcacaaatcgaaacggtatgtgctgttggtgggattttccccggttccgtttctcggtgtaatccatgcgtaggccgttccctcgctggctccatttccaaggttttcatcgggcagctctgtggaggcatatgcgaccacagccatctgtgacgaccataatcccgcagtcagacacaccgttaaaatcagggaaacaatacgtttccatatatgatataattctttactcattgctcacattgtctcctcacattaaaagttcagacattcttcctccggcagtccgtccagtaaaggttccgtattgctgccggcgatcagacctccagcatatttattttccctgttgtcagaatcataatggtagaatccggtcccctcttctcccttataccatctcggcttaaactcatcgtccaccctggccgcgaaccggccgttaatgataaccagccatccgccgtctttatccttcacaaccttcttattgccggtgacggtctttccgttggtatcgaccacccggtaggtgtcttcactgtcccggaccacgccgtacccatattcctcatccgcctccagccggagtccgtttatataataggaatcttttacccgtttgagacggtttctgttcccataggcgacaccatcacttttaaaaccaaaggtatgcactccatcatccagttccaccttcaattcactgccggtctgcatggaaccgtcattcagttcgtccggcgaaaagaagtagaggtccgccttctctataccatatatattcccttctatgaaatcctccgacgaccatgcatccatatcatactgggctacgaatgtgctgcgggtatcaaagagcacaaaccccgtctgcatcctgccaagtccgtcaaatgcataataccggccattcacattttttatcttattctgaaaaatctttccattttggtccgtgcgccaccaactgtactccccatcatcataatcatcctgtatcagattgtccgatggatacatccaaagccatgagtccctcagaaggcttccgccgtcataccccgcaaagaatttggcgggcacatcgctggtgggattgcttttatccgcattgctgacacttgccaccttggtccaccagggaagcatgattccatactcatcaaagccgtatgtgctgccgtttatatttttttgtatcagccggtctccattgctttttacctttttggaacggttgttaaaatacagccacacctggtcatattcatcgtaatccctgccgctgatatcactgttcaaatcctccagtccacttaactccagctgcgaataatccaaccagctctcagtctttaaggcaccgtctttatccgcatagtacacgccttcctccaacgggttttcatcctcatccaacggcctcccatcttcatcaaaccatccggtcagcatgcggccgctttcatcaaatatgtagctcctgccatccacactccgtttaaaagaagatgtggtatctcggtatgccttaccgttagcgccaaaataataccatccggcctcatggcccttctcatccccctcctccaccagaacccacatattttcagcccgcgctccatcatcaaacacataataaaggctgttcccctggtcaataaaacaattcctcagcatgagcccctggtcgcccagatagaaccaggaatctcttgactgtctccacgtattttgcagcggctcatcgttttcatctaaatagctccactccccatcttcgctcatccatccctcaaccgcataggcggtcactggatgaagcttagtcagtgcaaaagctgtaacgaccagagtgctggcaatgagcgttattctctttttcatcatcctactgtccttccaatccttatttgaaatatatatttattttaaaccctttgttatgggttgctttacccctctaaatacacatacttttcttttcttccgtatcgtaccgcctcttcatgggaatcaaaaaagatgtccagccgcattccctctaccgcttttccagtatcctccactgtgtaaaccacatcatcaattacaatcctcgtaccaagcggtatcacagacgggtctgcggcaacggtatgggatgccctgggcacggtttccgatttcgtcagcctttcctccttttccccgcagcatattgtacagctgcagtatcctgtaacctgaaactctcccagataatagggactctcctcaggcaactcggaatgtctgtatatggcgcatttcttccggccgaaccgctttgcttcctcatagctgtcaaaatatatccgcagtttttctttggcgtcttcatccactttatcctcaatcacataggtatctccgtcaatcagtaccgtgtcccctattttaaagacagacagtatgcctgccgctgtatggtgttccaccggaactcccccggaatacgtcatgtcactttcatccgaactgtaggccgccacctcccagtcccccaggtattcaaactccgtctggtgttccgtctggcgttcactctgggttgattcccggttcgatataatctccagccgttctaccgcatatggattatcaacggtcccggttccttccaggttcggctgcatctgttcagcacccgctgtggacagctgggaaaataaaatccaggccaccaatccaatcaggccgcatccaaagataaccggcctgagaaatttcctcatcatattatgccttcggcaggatctgcggaattccgtcatcctgtatccatgaatgttatctgtcatcctcctgtcccccgagtatcacaaattattatgcatggagtccatatccatatctttttgtgttataaatttccatctggtgcctcccaaacttttgtcccaagtaatgtcacagtatctccactccccatcaagccaggttctgttccatgcatgatctccggcatatacaggctcacaaatcagtcccgcattcctgcacagcataagataagcagacacgtatccccagcacacagcattaccgttcataaccgcatcatagatggtccggttcttcagtgtctggtcataggaaacattatcatagacccaatcataaaaatactcagccttctcccgatctcccaatgtgctgcatttctgcaccacctcagaaagcctgtcctgaacctgactgtgttctgataccgcccgagccggattcccgcatgacacataaatagcgaacttcccattttcatcaaatgagtataatgtcacctcttcttttcccaaatatatgtacctgtaataatatctgccaaaggaaaaggcttcctcctgagagtcaaaaacaatatcagtttttataaaactgccgttttctcttcctccttcgagtgcgtccagcacatcttccccaaggcattcaaattctggatactggctgcacatttggctggaaagctgcccagcaacgtcaacctggccagcggaggattctgtttgctgcattgcaaacaaattttttgcaaaacagatgttcatgataaatacaaaaacaaataaaaagcaaatagaactaaattgcttgatttctcatccctcccgtcctgtttttacaactaaatatttcttttgttgtaactaaaaaagggggaggggatggtaaaacgggatatttactgactataggaaattttaagagaattaattctgaagtttgagagaaagataaataacaaaaaatgtgaaaataataccaagttggtttaatttgttacccagcttactttttatatccttttttatcgaaatttttttaaaattatgtagaattttgtcaacaaatgtagtatactttttttaaatctttcaggaatatcctaaagtacaacaaaagaaatattctgttgtatcatacagcagcaatttcattttttccaactgtattctgtgctggcttccgctttcctttgtataaattctggtggtattaatatccctatgtcccaggatatccgctaattttgacagatttttttctatttcatagtatgtccttgcaaaaaggtgtctcagattgtggggaaatatcttttcagccttaacattggcctctatgccaagcgctttcatttccctccatatattactccgatccaacggcttaccgtttttcgttacaaaaatcatacctgaactaatattatttttttgcgcataagaatgaaggagcgaacatagctgtcttgttaacagcacagtccttatcctgcccttgcactcaatttcagcctggcctttatgaatagctgccaccgtgataaacgacaattctgatacgcggatcccgctcgcgcagatagtctccagcacaagggccagccgttcattcccattgtcaaaagcagtttttaccagcctcttatattcgtcctttgtcaattcctttctctcaggataaaaagaacttttgctgatttttaaaaatttactttcacagccatcccatccacaatatttaaagaaaccattgagtgcagctatgacacagttaatggtaaccggggtgatatgttccctcaggtttgctttccataaaagtaccatctcctttgtaaccggctcttctccgataaattctttaaattgttttaaataatgcctgtatttctttactgtttccatgcttctttcacaactttccagccattgaccaaacgcttctatcttctggtaagttatgagcctttcaccttttcttttcattctagcctcctgaaattacgtgaaatgatatagtttgctcagacggcaaaaaacatcctatatcccctttgagatattggactttttgcttattattagactttttcaaaaaatatcataaagcttgttttgaattatagtctaatttgtaattatatacgatttataaatcttttaatattatatttttattaattttcacagcgctggtccggcaatctcctgttagtttcattttccgcctgatagccactgtacattgcggtttttattctcattttcgcatcattccacaaacaacatcacccagaattttaagccggcggagccggtaagacatttccatgaattctgctttatgattcatttcatccactgcccctgcgagatttacatataataccgtataaaagacaaaagcaaaatttcttttctcgaattgcctggcaatacttcacgtatacatatttactgtttagaaatatagtgtcattccattaaaaatcctgtaaaggctgacagtctttacaggatttccatattccatgttttattttctaaaagctacttccaaaattaaattttgcactgcttatccatttatttttcattgtcatcccctctttttctgccaaggaagccatacaggccaagcataagtcctgacatcagacatacccactgtgccattggattctgccctgtcttgggaagaggcgccaacggaacttctcccggttcaatggtaactccttcgggaagaggcgctaagggaactgcttccggttcaatggtaacaccaggtccgttggtatccggtgtcgcgcgatgcccgcccggggtggtacctcctccgcctccaccactggtgcctccgccggatgggggagttggcggggtgggaggggtggggggagtcggaggagtcggaggagtcggaggggtcggaggggtggtgttttctggtactaaagtaattgcagcatagtatccacaattgtaaccctgatatgcatttcccattctgggatggaaaaacattcccagagtaaagtcacagctttccccgctggataatccatcgccgagtgtatctgcgaaacttgcatccgcgctctgccattcgctggtatcatgatccataaacagtgcaaggggtgtatcatatccggttctctcaccaaatgtcacaccaaataattccttataaaaagtgtcatataaaaggcctccaagctccggttccacctcataaagccgcgcttcaagtttactttttgatgtgaaaatattagcgaagtcaaagtagggataagtaccgtcatacttagctgctacttcatcaattgtaccgcttaaatcaaatgtgccgttattacccacactttccattgataaattgccaaatacagtacttaaatcatctgtgtgatagtaattcttataataatccgttaaaggataatcgccatcataacctttttcatataagacatcgtaaatagtcagcatgtcttcaaaacttatttttgttttgccaaacagctcttttattgcattgttttgaacccggtatgctccataagtacggtcaattatctgtccgtcaaatcctttgatcgtcacatccattcctgaaaaggatgtgtcaacatttgattccggcgtttgaaccgataggctgtttgcctcatataaatactttatttttgaattattagtcaggtttaaatttaaattaaatttatacgttggcatgactccatcgtccgccccaaatttgcgcattgcttccataaaagcgtcactcaacacaaatgtaagtggtccctctgcatcttctgcgattgcagcatctacggtaagagcatacccaccctgcactttattcaaagtactatttgttgtatcaattactatatattctgaattatttctatactcaaatgtgcttgtagatgataaatatgatgttggcacatatctatgtccgaattcgttgccatccggatatgctattgcaaataccgaaaaatggctggtttcaaatgcaaccgtcccctctccttcatttacatcacattttatatcattaacttttagatcattttcctgatcctcaaggtgaaacacgttaattttatctgattctacagatcgctcatttgaaactgattctggaatatccaggccggaaaatgaaacctttacattacatcccggttgaaccggctgtccattttcatcctccagagttatgtcaaatacccttacttcaaccgacccgtaaccatccgctgcacattttcctttaataacagaactggtatcttcatcatcaatagcaattgcagataacgattttaccgaagcgtcaaattcaccatccaatggctccactgaaattgtaattccgtcaatctctgccataaatgctgctgtatcagaaaccgtctcctctgtttcgagaagttcaacctcaatatccagattctcctcaatatccgttactacatacgttgccataccggccagcccgctgtcttcctccgtatcctcttctgcttcagcagccagctcgtatccattggctgttacaatctgaatcacataaccatccacaggtttaaccgtgaaagatagctcctcaccttcctgtattaaggtttcaccctcaacctcagctgccccctccggatttaccgtataggtgattgtaaattccttctctttttcctctttgtctgccaggtctccagctgccgccccaccagctgctacgccacctgtttctccattgacgttttcttctccttcgactccaggatcttctgcgccttcccctttgtttccggttccttctccgatctcgcctccggcggtctctccgccttccccttcacttccggttccttctccgctctcgcctccggcgttttctccgccttccccttcacttccggttccttctccgatctcgcctccggcgttttctccgccttccccttcgcttccggttccttctccgctctcgcctccggcggtctctccgccttctccttcgcttccggttccttctccgctctcgcctccggcgttttctccgccctctccttcgcttccggttccttctccgctctcgcctccggcggtctctccgccgtccccttcgcttccggttccttctccgctctcgttaccacttgagctatcgcttccgcctgtgctgtcgcttccgccggaactgccgcttccgccggaactgccgcttccatcggaactgccgcttccatcggaactgtcgcttccactggaactgtcgcttccgctggaactgtggcttccaccggaactactgcttccacctgtgctatcgcttccaccggagctatcgcttcctcccaagctgtcactcccgcttcctcccgtgctgtcgcttccgccttcactggtaatctcctgagccagagacacattcaaacatgtgccgacattagaaaaagcaagcacgatggctgtcagcagcgccgcatggcgtgaatgctttttcataacatttttctttatcataaccagtacctcctgatatttacaaatacaaccctttactcaactcatggtaatataatataggagagggtatttcaaaaagcatttcaaagaaacaccttttcgtgtctattttcagctttttccaatatgtgactgaaatgtaaccaaaagggaacctttttcaagattcccttgctatttctatatgcacagaatgaccgcccaagcaaaaatctgcctgtccattttacacagacacgcacggtgcttataccaatgtattccacgctgtttccaaagccaccgacatcatatccccaaaggactcctgccgcttctgcgcggtcatggccttctccttacagttttttcacgcctgttatcttcttttcctttttctgtccccggacaccaatccttcagattcacgttttctatatgcagacttaccttttgcccataccttctgcgcatcccggatacaatacggttttcaacaatgcggcatttatcttcccgcagttcgtttgccagaatcagaatctgatccggtccgtactttgtataaacgtctcctctgcgaagggtactgtggaccacttcacacagagcgtcctcatactcctgaagcttcccgccatcctctaccggacaatctttcccgtcccggaccgtgcatacaatcagaaatcccctgcgtttcccccgctccacggaccggataaccatacggaagcagtcaacaaatcccggataagtacaataatacgatccggccgaccactccctttcctcaagattccccctgatctctttcagaccgccattcacatgctctatctggctgccaatctgtttgaaatacgccagcacgtgatccgggggaatgctgccggtctcgtcaagcagcgtttgtgttacataatcatatgtctttaatgcatctccataccgctttaacgccaacaaagctccgatcttttgctccgcccactctgccaggggataggccgcagttgcagcatcgcacagcctcacaatcttctgatggtcccgatggttcttcatcaggcggcaggcttccctcacgcctttgaaataaatatcctggtaatggctccgaagagattccgcccacacctcgccggacagaacaggaaggaattctccgccgtaaagacggcaggcctgttccagaagcagctgacgtgcagcttcatcttctgtttccatagcccggttataataatcttccatgagagcggcgtccatctggagttcaagttctccccccactctccccattttcaaataatatgtatttttttcgaccaccacatattctcccgaaggcagaacagactgggaaagtatttttctcagacgtgttgttgtaatcctaagcgcgtttgcagcatccgtacttcttctgtcataaagaaaatcctgaagctttacgcggctgattccattttctccagcccatatcaggagcaggaaaagctgcatcacctttcccttaaccgacatcggcagctcccacggctctccattataaagtatctccagtgttcccagcgtccgggcatataatgtattcctgaccgccaggttatttttgtttatctcattcatctatggtaccgccttttagcgtctatttttccaattataaccattatacaggaaaaccatttcaaaaagcatttcaaacttacattattctgaatttatttatgtctaaagcccatttcccggagtaggaatggtcaattttcaatttaatcctatacgcttccagacccataaacttcaggaataccaattggtagagccggacctttaagtgaaagaagagttcgcagtacgcaaaaaacggaaaagaatctgcaataagataatttcccgtttttatgttatctattttgatatccaccgaaactattcagtcagcatctacccacaaatgatatgttccacagtgcagacaccgaaatagatatccggccaagctgccgctcttttccaaatactcccgtgcattgtcaaactcatcacgggcatcgtattcggcaaaaacctcatccacgatgcccatccgctctaactcttctgttccaacatcaccgataaatgcacaataatcattacaacaagccagccagtattcaccctgccagcttgcatatcccggagtccgcttaaacaattcctctgttttttgagggtcggaaaccaagccgctttccgcatcctgaataaaaccacccctcaatttttctgctgctttcccgtctgatatacactccaggcagatacaatgaacatcatctatacaatacatagtactacagtattcattcacttcttttccacaacactgacagatgccgttttcatgttcaataatatcgttatcatatacgttggggtgatacttaaacacaatcttcttttccatatcattacttcctcgtaacatataaataaacgctgctataacttccgattcaggtaaattataccacatagcagtccaaaagaacataacggaatccattgccggataacggattaaacatgcacgaaaaagcaggccttcccatgcgccgcccaatgctgtgcatactgaaataaatatgcggcccgccgggaataagcggaccgcacagcatatctatatataactctgttcagacacatccgcatccatgggattgttgtggacgtggccgaatatattgcattctggtttttctaacactgcttacggcaggttcaggctttttccaatgggcggtccaggatatcacacagatcgtcataatccatctcgccgttaaacctcagtacttcctttccattccggaatatgactacgaccgggatacctcccacattgtaggtgtctaccagctcctggtttgcatccacatccacataacggatttcgtatgccccgtcatattcttccttcagggcctcttccagcacagggtgcagggccttacagtgaacgcagcgctctgcgccgaacagtaccaggaccggtttatcctccactgccaggacctcatcattccagctggctgtgccggcgggatggaatacctgcgtatccacctcaaagaccttttccctctgtgacaggtcttcctcatcatccgttgccacacagagcgctacatcctgataatacggcaaagtcccctcaacgtcaatcaccgtttttgccccaaacgcgcccgcgcccggaacacggtaagtcacattgtcaatgcgctcaatcggtacctctgccggaaccggctcctgcggcacataactgtaggggtaacggtaggccctgtaaatcatattattcctgggccccttttcattgtgcgtgtaatacggcgaaatccattcccaaacaatctcatggtccggcgttacctcaatgagtctgccgtctgagccttcggttaccagggtattgccgttgggcaggcgctgtgcgctgctgacataggggctgtagaatttgctggcgtccgtgggaatcgcatggcccagctccttgggagtcagtttccataccacttccaatgtaacaggattgaactccagcacacggctgtaatccctcaatgcatttttgatgccgattggagaagatgggttgggggtcccgtagccgccccagccgccgttatcaaagaccatcaggttgccttcgcccggcagacccttgggaatcatgtggaaatgatgctgtccgataatccatcccagcttcttaagctccggcgctgcgttaaaatcaggtccgatccgccatacaatctttccggtttccttatccaggattgccaggatattggcttcccggcagtcaaagattatgttgtccggcttaaaacgcatatctccctggtcataccatttattgggtcccagatagctcatgcagttcacatgcaggtaatcgcccacacctccgtccgatgcgcgcaggttggggtcgcggaacagcacgttcttggcggcctcgtcaaatcccagttcgtcaaaatgctcgctgatggaccatttccataggatatttccatcccagtccacttcaatcatggcgtcatccagcagttttttatcggaaatcttgggattgtggatggtctggtggaccaggatcagggtgttgcctgaaagtggctttgcatccattccgggtacgtaataaccaaccggattgccctccctctggtaatcatgatgctggcgcgccatccatctgtggtccctgccaggatcgtcgatattttcaaaatggtcaaattcccatacaatattgccgtcatagtcaatctcaatcaggttgaccccgtcctgcatgccatagtcaggatggcggtatccggaaagacccatcacatatccgccgggaagaagctttggcggcatggcgtgcatattccagcgccttacctcgttgccgttcatgtcaaacaataacacgccatcattgattaacggaacaatcgtataaccgctccagcatttttcagggttgtaaacagtgactccgtgtggaaaaacaagtggctgtcccataattcatatcctccatttaattattattatttgttaaaaagcctgtttgatttcaaccagctttccgttatcgtaaaatgcccccgcaaccgtccgttccagcttcaggctgttgtagagcaggctctgccttgtgacgtcctgcctgtataccctccactgtccgcttaactcctgttccagctgggcggtcttctcaatctcctcattgctgtacgggttgtagaataaaaatacggtcctgcccgaatccggccccaggattccctgtatctgttccagttcctttacatagcgctccgatgcaactgccgccaccgcgccgtctgccgccgaggtaactacctgacgcaggaatgtctgggtacaatcgcccgccgcataaagtcccggaacattggtctccattttctcattgaccttaatgtaaccggccttgtcgcagtccaccatgtccttcaccagtccggtctggggcaccatacctacgaacaggaacaggccgtcagccttcacctctgtttcccggcccgtgtcaacattctttaataccagggattccacatggtcgcttcccttgatttcctgtaccgtggaactccacacaaaatcaattttcgggttcttataggcatgctcggccgcaacctcgttacagtccagatgtccttcctcatgaagcactacaatggtcaccttggatgcaaagccggtcagataatccgattcctcaatggcctggtcgccggctcccagcacatagatttcctttcccttgaagaattccgcatcgcaggtcgcacagtaagcaaccccatgcccggtaaattccttctcgcccttgatattgagttccctgggcctggtgcccagatccaggatgacgctgcgtgccatgaaatccccccgccgctttgtctccacaatgaatgtatcgtcctctttccggacccctgtcacggtggtgcgcttaagttctaccgtgggatggccggccgcgtgttccctgaacagttccatcaggtgctgcccgctgtccgctttcgttcccggataattcctgatttcatacgtatcattaatccttccgccatagctgcccttttccagcagcagtgtcctgcgctcggaacgtccggcataaatggctgctgacagtcctgccggtccgccgccaacaataataagatcatatactgagtccataaacaactctcctttctatcataaaacacgattttggttcacattattttctggttcatatcattctctgcttcagctcccccttaccggggaaatctcctgtgccttttgatgtccgccctttccagccctttctcccaaaaccacccagattacacagattcccgtaaggaacaggcagtaaaatgccgcactgaaaatctggaatggggataccgttggaagatagctatgcttttgcaccatctcattgataattgtcacgctgcccatgacaaatgcactgttgataggaataatagcgctgaagttggtggcattcgctgtcaggagaatgctcctgcgttccggggatatgccgctttcctgcccaatcctgtccgccatgccgccgaacatcaggatagacggcagcacacagcctgccagaagtatattggtaatgacgattcctgctgtcagtacggtctcagagccgcgtgtggttcccatgatattcctgcgtaaaagccagttacagcaccgttccatcatccccccatccacagccactgcaatcagcccatacagcaggatggtggaaaccaccacatccagcattccgctgattccctcaaagataactcccttgagccccaaagtgccatagtcaatggccacgatgtcggaaggggcaagaacccctgtcagaagtcccactgcgaatcctgacacaattgcaaaggacaatcccataaacagatttccggtcctgaaacagacaagcagcagcactgccagcggaaccagcatccaaagtccctgtggggaggacatggctgatatctgggaaatatcccccatggcacctccgcgtccgccaaaaatcagataaaccaccatggctgccccgccagccgccaggatatagggggttctcatcctcagagtcttcaacaggtctgcgggccgtcccgtcacgccgtcatgctgtatcatcacagttgtattgatgacctgtgaacttggggagattgcatccccaaagaaaataccgctgattaaggcccctgccagcatggccggattggctcccagcaggattcccggcggatagaaaatcggtatcactgcaaacatggctgcaatcggtgcacctgcccccatggaaatcatggctgacgccaggaaactgaataccacgaatccgcttcttgaaataccaagtttgaggctgagccagataaacccgtccccaatccctcctgtattcatcagcttggaaaaaatgccgatgaccataaaaacaaatatcagcctggaattgccatactgggccagaccatggaccacgctgtcccaatatctgtccttctccctgcataggaaaaagcctgcaaagagggagaccgccgctgcaaaggacaggcccttcatggaataatagtgaagtccaactgaaaatgtcccgccgatcagtatatatcccactaacggcagcatggcaaacgcctggttaccataaaatgtaagtttcgtttcctcagtcttcatattcgttccaccaatccctcccttaagatagttaaaattataacaggtttttttcgggggatgtgttggagctccaacacttatgaaaattttataatttattatcgtttttttaacatagcagagtcattagtacgtatatcattgggaagcggttcgtcaatctcatgtcaatactgctattatatgttctttcattcgtttttaattgtgcataattaaccactattttttataaaaaaagagcccccacatccggccggatgcttggaggccctttccatatcaggtttactcatctttttatcagttgtttgtctatttttcaacgttccagacaaaaggaaacaataggaagtggagccgccggactgcaaacggcacgcgaagtgcgcacacagaacagtgatatttgctaccccttcgttggccaaatggattggcccagatggattgacccaaatggacttgcccgaatgacttggcccaatgaccgccctatgggaccttagaatatctccgtttcaaataccgatttgtccgactccccacgcaagccggacatttattttgaaggtcttgatttctcctgaaccaactcactttcaaaagtaacttttacaacagcatgatttattttcgttccagtaaaccgcacatcgtactctttctctttttgtagattattgagcgaaactgtgatggtatcaccacttactttttcatcccatgtattgctccataaaacttcatctgcatttctatcttttatttccacaatacccctttcaccatccatctgaaaatagacctctgcgtccaaagtttctatatcctcagacacacaaaataagcgtccattctcaaacggatctgaattactgtaatttgcattcatttccatttcaagaacggttttttgtgtttcctcagtatctgatacatttgattgattagcgctggctttttgacacgcgaacaagctgacaacactaataatgccaactaaaaaaatagcaattttttttgtgctaaacatttctttacctcccttacaaacatggatttatataaattataacacatagcaacccaaaagaacataacggt

SEQ ID NO: 3418 - DNA, 205 bp, Unknown
  gut microbiota DNA sequence
gtgtatggataaaaaacggcttcaatggcatcccggtttttttgcagtattgcagattgaactggaggaagaacggcggtttctgcggttttacgcggagtataatcttacaaggaagcccttgcagattgatgttctggtggtcagaaaggaaaccggacgggtgatacaaaagaacattggccgcatattccgtcagtataat

SEQ ID NO: 3419 - DNA, 153303 bp, Unknown
  gut microbiota DNA sequence
gtcggtatcttctgtatcagagccagcttcttttccctgtacaaatcgttggtatggttaatcaaatcttcaagggtagagccccttaaacctctggaattccaggtacccatgtcagttcattccttttatgtattatatatttacaggacagtgtgtccaatgtgtcttaatcctgtacgtcagataagtataccaaaatcaaggatatttcacaagcacagcagatttaaaaaatgaaaagcagatttaaaaaataaaaacaaaaataaatgaaaggattccggcgactcaatcgtattaatagtgaatgaatcaaaaaaggagattgaaaaacatgaaaatcagaactataatggcagcagcagccacaggcattctcttaaccgcagcgggcagcagccttgcatggggtgctgactggacttgtcccagaggatatgctgactgtacggactacgaatactgcaggagccatgaacacggagactgtgaaggccactggtcagaggacggggattgggtatgcccggacgggaaccatggacggacatcctcatcggacccctcagggtatggatgccatagcggaaacagccatcatggcagacgcggctgcggttcacatcacagatagggaaaacagtactgcacctggcagtaccggacatatggagcggctatgcggcaggaatcagatgtagagcagaccattgggcaatacgcggatatggtaaaacatatctgctttgtctatatgaaaaatgaaagtgatacagaggacgtgtttcaggatgtgtttttgaaatacgcccttttttctgaaccctttgattctgaggaacataaaaaagcatggctgattcgtgtgaccgtaaacaggtgcaaagatttgctccgcagtttcttccggacacacacctgctctctggaagaggccatgtccatggctgatacaaaaagccaggacctgtcccatgtgctggagtccgtgatgaatctttctgataaatacagaatcatcgtgtatctgcattattatgagggctattcagccgtggagattgcaggtattttacataaaaatgtcaataccgtatatacacatctgtcaagggcgaaagccgagcttaaaaaaatgctgggaggtgatgagggtgaaacaaagtatacatgatgcgtttgatacagtcagctgtgatgaggtcttgaagggacggacctgcgaatatgtgataaaacacatgcaccgcagcagaaagccggcgccccgcagaatgaagtgggcggtatcccttgcctgtctcctgctctttgccaccagcggcctgggcggttacagcctgtactacacggaagcagccgtcatcagcatagacgtaaatcccagcattgaactggacatcaaccgctggggaaaggtggtggaccagaccacctacggtgaagaaagcgaaactgtcctgcagtccctttcgcttaaacatctggaatatgaggaggcactggcgctcctgctggccagcgatgccatgcagcagtatctaaaaaaagacgccctggtctccatcacgctggaaacaaaagacggcgacccgcaaatgttctcaagccttcaggagtgtgtaaacacagccttaatgcagtgccatggcgtaaaggcagagtatgccagcgtggacagccatatgtgtgaggaagcccatgaacacgggatgtcgctgggaaagtattacgccatacaggagcttctcaccgcggacccccaggccacgctggatgaattcaaggataagagcatgaaagagataaaggtccacacggaacactgtgaacaccggcagcagagaatacgtggggaactacaggggcaatcccaggcggaatctcaagcggaatcatcccaggcagaatcatcccaggcggaatctcaggaagaatcatctcaggcggaatcgcaggcggaatcatcccaggcagacttccagggtgaatcccaggcagatttccaggataagttccctgacaattcctcacagcctgccaagcgttcccacagtcagacagacagtcaggaaaccggctgtcacggcagccggcatcacagccgccggaactagattttccttatatctttagcaggaacgcctgccacagccgcgtggtccggcacatcccggatcacgacggctcccgctcccacagtggcctccgttccaatcctgattccatctatgatggtgcagccaattcccaaaaaagttttccttcccacaaccgtatgacctgccatggagaccttgggacagacattcacaaaatcctccaccacacagtcgtgctcaatatctgcctgagtatttatgatgcagcctgttcctatggatgcataggcgtttatgacggcataagggtgtatggtgcagccttttgctatcctggataaagggcttatgactgccgtgggatgtatgatgacagcaagcggaattcccagggatacaagcatggatattttcttttcgcgcagttcattgctgccggtggcaacaatgacctcatcataggatttcaggatctggtccaatccatcgtcttccctgcggatcagatattccggaatggcacggtgtcccttttctttcagttccataaaatcaatccggctataccggttcatggccagcgcgcaatccagtgttacaattccctggtcacctgcgccccatatgagcaggcgtttcaccggttccccggtattcctgactttcctttcactgccttttatttcactatctttcatttcatcatttttcatttcaccatcacccattttcccatcctccattccttttttctccctttcaatctccctatttcaccatcgccattgcttaacctacgttccgcaatttttcacaccatcagctcaaatagtaaaccagatatccctttttagaggaaaaccccatcctctcatacataccaagtgcctgttctgaggaattgaggcacaccattttggtctctcccctggcctcctccatcagcctctccaccatgcgggtggcaatgccctgacgtcggaatgcctcatccacccatacattggttatctgtcccactcttccactgggattctcattggaaggcagtacatcgtaaaaatacagggtagccgtggccgccagctccctgcccgcatatgctaaaagcgtacggcaggcattttccttcattttaatttcataaaaccttcgtatggcatcctccaattttgttcctgccgcacattcagaaaacatcctcaaatcccttatccgcatacgcacaagaaaatccaattcatctatgtcggcaaaccggtattccagctccatattaacctccctatcctccctgtggttccttatccatatttacatctcctggctgacaaatcttacatatcttcgcagggcatattccccgtcatgtgcctctcccgcaaatggcgatgacatggttcctgccctggtaatacgcgccacgccgccggacgccagagtcttcataagctcaggccgcctgtcctccctgcaaatcagtcctgctgtctggaggtgcctcttatggcgtcttaagcaaccaaacagctgcccctgcggcaggcgctttaccagacagttgccaaacatgggagacagctccagctcatgatccccgcaggccgtaaggctgcagccctttcccggatacagcttcctcattttcttttttccatacgccatctgttccatcctgtcattatgctgctgaagcgccagggctgcctctgccatattcacagagccaaaccgggattccacgggccggaccgtggaatctttctgtaaaatgtccggctggaacagtgatacatgccccgggcaggaaagaacagccctctccatatacggaagaaattcccggcaaaattcattcacatcatccatacgctccgtatccagaaatatagtctgacaggaactgcacagcagctgccgtgtggacactatatgctcagccagagcagacagctccttatccttacactcataaccggagatatatacaaatccaagcttatgcccccattcaatgagtctggttcctggcggcgcgcttctgcgcacagcagccaccgccgaatctcctccccataccacaataccatcagccatttcttccagccgcctcatggcaggcaggtccccggacgaggtgtcaaagacataaatgtaatccgccagagcgggttccagacggataagacgcaaaataatatccatggacagtcctccatcattgcccggaagctttaatatattcacatttccggtaagcagtccctccacaatgctgaatacaggcagcccttccatatttccggctgttatgtgcaggagcgtccccagggggagtatatgagtctccattttttgtaattccgtataatgatatacttcatggctagggccaggttcgcactctgtactgcctcccggttcactttttcgccctttgcctgcctttactcccagttctgtttctatcttatattccagccattcccggctgagaaaccgggtcagacatcccagccaggccggtatccacgggtttccggcttctccggccgtctttcccggcgcagcgttctccagttcctctctcagctcctgccccaaccgaaccagcccgcgaatgaccctttcctgctccagtccgcgtcccagcctggtatcattgattcgggcttccaactgccccagcagttctccctgaagcatggtatcatatacccttccctgaaacagaatcacctggcagcctccttcccatatgtgccattcaggatatcctgggccccggccgcgcaggtcttaataccgcttacccctgcccgccccaaaagctccagataaggagcgtcaatcccgcagccgcactcctttcccacatggagcactcccacatcatccgtcatcacactcagaaccggaaccgcctttatcataggcgtgataagattgaccagaccaggcctgccatatcccaaaggctccatggtctttatatcccgtatgatgacctggctgtacaccggaacatgaaaatgatggttcctgcaatcacagtacagcaccggatgttccgccgcgctgaaaaattccgcaacatccttgtcctctattccaagcacacggcgcgcaagtccatagagaacctccttgttcaccttctgtccctcaaactgtttccagccgccggaaagaatcattttggatccccccggcagcgtaaggtgtattccccgctcctccatctgcttcaaggcaaaatatgcataagacggaaagcccagtatcctcacaggcacggccccatggctgtaccggcaaagccggtccatgacatgctccagattcgggatatactgtccctgacggtatatcagggcataatccctgctgagaggcggtgcgaaaaaagtggccccgaaagtgcttctggcaaccgccgtgcggttatctctgtggggttcatagccgaatataacgtaacgggccggtctgagagacaataatcccctttttgatacagtgcgcgccaccatacccagaccgcacagcagagcgccgccgtcaaaattcacctggctggcagttcctgaagtcccggaggatgtggttttaagccaggtacactccggggcaatggagtgtatgtcatgatgtttgaaaaacagggtgggcagaacgggaattctccctatatcccggctgctttccaagtgtcccggccggaatcctgaccttttaaggattttgctgtattcccggcagtgcctgtaatggtaagcacagttctctctgactgcggaaaaaaacatctgctctgcgccctgtctgtcatagatattctttgtccagaaaagccggtatctgcttaacctgcctcttgtgattccgtatccttccatatagcctcccaatatccttgcggtacattgttctttcctgctgccagcccagcatcccctggcgctcccgtattttggacacggtacagaactctgccagcgtttccctgtatccgccgtccccgttttcccggttttcgctgtgtgttcccatccgttctgcagtatacccggtatccggtattcccggtccaaagcagcgtatatcatagatccaggaatccgcgcccctatcatccctctggctgtttttcctgtaatctaatatgcgcagctcagcgatgagctcattatcctgcatcatcccacgcactaattccactttcacgccatccttactgacagcatatccattttcatcctccagaacatatacaggatacggtgaatgggctataattccaaatcccggggcaaactgatatgcaggtacggctccggatacgtcctgtgcgttttgccgtccctgcccgcacccgccgcaccccaggaaaaccccaaagattcccgcaaggattcccgccataacgcctgctctcttggcccgttttctcccccagccacattgcttcacaatattccctccattcccctctgcccaaatgaaatttactatattatccagtatattggaccaaagaaagcaagtcaatggagggctccagatattaaggatatcttcataaaatggaataaaatcaaaccgtatgtatttatgttgacacatgttaacatatcagctatactatatattaacacacgttaacatggagaaatgtaatatgaatacagatataggcgggaaaaaaccatatcattttggtaatttaaaagaagcactcattgaacagggaattgcgttaatccatgaggaaggaattgaaaagttttctctgcgaaaggcggcaaagaaagtaggtgtatcagcggctgcctgctataatcattttggaaacatggacgatctgctccgggaaatgtattcttatgtgattgacagatttgcagccgctctgaaacaggcggttgaagataatccctgccatcatgttacaatctcaatgggcgtggcctatgtggaattttttgcagagtatccgcactattttaatttcttatttgacagtgaatatctgggcatacaaataaaagaaacagaaatcacatggaacagctcttttactccgtttgaaatttttgtaaccggcgcgaaaagaggaatgagggaactaaacattgatgaaaaagaattaagagatgaccttttggtaatgtgggcagccgtacatggcctggcagccatggccaacatgaagggggtccagtatgacagcggtgattggggcgctcttacagagaggttactgctcagcaaagtaatgctgtgacatatgttaaaggaggaggaacatattatgacggaaatagaagcaatcagagcaaggcacgcagtccggaattatacggcgaaaccgctctcccctgagattattgatgaactacgccaagaaattgagcagtgcaaccggcagggacagctgcacatccagttagttacggaaaatgaggaggcgtttaaaacctttattcccttatttgggcggtttaaaaatgtaaaaaactatattgctctggcagccaaaaagcaaggcgatttttacgtgaaatgcggctactgcggagcgcggcttatggttaaagcgcagcaggcaggccttaattcatgttgggtcacaaatacatacaatgcaaaaaaatgtccggttacgttagctcctgatgaggaactggttggtgtcattgcgattggttacggcaccactgacggtacgcagcataagtcaaaaagcatggaacgtttatgtaagccatgcagtgataaatggtttttagatggcatgaatgcggctgtacttgctccaaccggtcttaacagacaggatttttttatcgaagcaaacgggaataccgtatccatccgcacaaaggacaatcaccctatgtcccaaatcaataccggaattgtgaaataccattttgagattggcgccggaagggagaattttaattgggaataattgaaacacatatttttgcagggtaaatcatgtggatgcatcagaatggatacagggagacggcaagccttttgccgtctccctgtcctctattttttcacagggaagaaaatttctgtctcccactcttccggcggaagcttgtcaaactgggtcttgcggtaaatctcgtaaggcatcccattcatatgatatccattggcgttaatccaggccacaatggcgccataggcatccggcagtcctgaataggcgcccttgtggatggtagttgcacacagacagcccggcatgacaaaatcagccttatcccgctctgtgattcccactcccagctcgatatcgctgtaagccgggtcaaattcctggtcatggtagatggccattaccactccgtttatggtcatgtgttccctggcaatcttttcatatatcttcccgtaatatgtgccgaattcctccactgacatcttgtttctccgggtaacgagaacctgttcctctgcttcctttatctgaatctcataattgttctgataactcataatgtcacctgtcctttcaaattcttccagatgataccccatttcccttatggttatggaaatatgctccatctgccgctccaggcggaatctttgtttgtacagctgccgcagcaattccctgctgtccgggatggtaagcagagcctggatttccgtaagggaaaaaccataccgtttcagccttccaatcaaaagcatggtgccaatctgagggtcctcgtagtaccggtatccgtttatctcatctattctctggggctttaaaaggcctatcttatcgtagtgacgcagtgttttcacactcaccccgcacacttttgacatctgtcctatggtcagcatggtccgctcctccattcatgttctgtttacctgattcgaatctgttccaagtataagctctgacctaagggcagagtcaagaggttgtttataaaaaactctctgagcctcatccctgtctttcctcagattcataaatatacagcccgtatgatgccggatatcaccacagccaataataccatgaagatcaggatataaagcatcctgtcattctttggcaggtccgctgttttatccaatccggcccactttacccccttatcacggcaaaagtcgagaaatgcatccatctcccccaagtccttaaacacccacttgggaaccgggatacactctatcccgcgtgctgtctctgtattcaggaaaaagaatgtgtcctctgtttcagccaggcagttataatcctcccagctgtactctgtaaaagccagccctcttttcatgcggattccatttaccccaatcgaaatttcccaccttccaatcccgtctgacggcatccatccgctcatcatctgtttcttgtaaaatgactcggacaaaccatggcccctcatatagctcaaaagaagcatggtcagaaaaaccgctgtcaggatggcgctgtccgctatcataccaatgctcattccgcataaggctgccacgattcccgttacccggagcacttttcctttctttgcaccgtataatttttttacccgaagtcccatctgcatcccctgaatccaggcatgggaccaggccctctggtccataaaaaaataaaagttaaaaatgccttcagcaacatgtccgtcatcctccactgcctggggatctgtaaattggtccagaaaccggtccatggtttctctgtccggaaacatacgtttaggaacagccagaaacacatagttttttcttgcagcaggccttcccaaaatcaaaaccctgggagtttcagcccgatatgtataccaggaacacggaatcctgcttttgtcatttttacaacacaagtatcctttttccaccttgtatgccctgggtttcaggaatcccagcctgctgcattgccaatacagaagaatacacgaaacagccagtattccgccaattcacctttggtcatctggaattccaaccctgtttcaaccttctctccttccatctctttcccctctttctatgtcatgcctttggttttcagttaatgctttcctccattgtaccatttaacggaaaaagaccccagcactttctgccggagcccttcatccatttatctcttatacttaatctgcttaatccatctcagccctgaaccgctcagcctgttccgcaatcaattccttatcctcgaagtaattgatcttcatggccctcttcatctcagccagggtctgggctgccttctgctctgccctgcggctgccttcttccaggatacggtaaacagcaggaatgtccctggcaatttccttgcggcgctcacggatgggcctcagttcatcctgaagcacgctgttgaggaaccgtttcaccttcacgtctcccaaaccacctctggcgtaatgggccttcagttcatccaggttcttgtaatccggcagatatgctgcaaaatgctcatcacggcagaacgcatccagataaatgaacacaggatttccttccacctgtcccggatcctccaccctcaggtgattgggatccgtaaacatggacatgattttcttctttatctcatcctcggaatcagacaggtatatgcagtttccaagggatttgctcattttagccttgccgtctataccgggcaggcgcagacacgccttattgtccggcaaaaggatatccggctccaccagggtatccccgtaaacactgttgaacttatggacgatttccctggtctgctcaatcatgggcgcctggtcctcacctaccggaaccgtggtcgccttaaaggcagtaatgtccgctgcctggctgattgggtatgtgaagaagcccaccggaatgctggcctcaaagttgcgcatctgaatctcggattttacggtaggattgcgctgaagcctggatacggtcactaaatccatatagtaaaacgtcatctcgcacagctcaggcacctgtgactggatgaacagaacggatttctccgggtccagtccgcatgccaggtaatccagagccacctctatgatgttctgacgcaccttttccgggttgtccgcattgtctgtcaaagcctgggcatcggctatcataatataaatctcatcaaactcccctgaattctgcagctccaccctgcgttttaaagagcctgcataatgtcctacgtgaagccgtcctgtggggcggtcaccggtcagtataatctttcccatctgatatatccctctcatttcctcagcatcaggccatcgctggtctgaacgctgttttttacttgtacagaacatgcctgaaaatccccttaagccagccgttctccccacgggaaaaacagcagcaaaaaaatggcaatttcaaacattatctagcataacccaaagatgaattcctgtcaagaattccctgctccggtccgggacaaacctccatggtccgggcctggttaaatgccctggctttcgcaaggcagcccaatcccctctccttccataaccgtattaaaaatcaccggcagcctggcggtaaattcctctcccctcagatgcttaaggggcgcaggaagtgtttccggcatgacaagccgccaggagtgaaggagctgggaccggaccgcgtacttcttttttactgcatcgtttaagctgcggctgccatacttataatctcccacaatcggatgaccaatggacgccagatgggcgcgaatctgatggcttcttcctgtaatcagggtcacctgcagcagtgtgaatgttttgttgccggacagcggcagatattcggtcataatggggacgctgtcctccacttccagaggaaaaatgcttacggtattcgtgctctcatcctttttcagaaaacctgcaatcagctgcttctcctttatctcgccggcaaccagacactggtaatatttgtgtatgcttctgtccttaaatacctcattcatcacctggaggcctgccagggattttccggccaccaccagcccgctggtatttctgtccagccggttgcagatagacggcttaaaggtgcgcagctgggatatggggagttttcctgaatcaatgagataattaagaatatattcgttcagggacatgtcgctgtcctttgccttctgcgacagcatgccggacggtttgttcaccaccaggatatgctggtcctcatagacaatgtccagacgccgtcctccctcccggtctctggaaccctggtgttcaccgccttttccccgggccttttcccgtttctcatgggaggatgctcctgtgctgctttggtctcccggctgtttctcatatccgcccatatccgggacagaaaacttttctatggtctcatccgagaggaacagctttacctggtctccctcttccagccgttcggaaccatcgcattttttgccgttcagcgttatgttctttttacgcatcattttatagataaaacccttgccggcctggttcagatattttgtgagaagcttatccagccgctgtccggcctcattctgggtaactgtcagtgtctgcatatggcggcactcctttgtaggtaattaatcattcatgaagctcatgactgccagaagcaggcggtggggcatcatcttgcacagcagccggaacgccttcatggtaatgccgtagaccgaaatctctctgcctgcaatgctgtcccggatggccttttgaaccacccgctttggatttgccatgaccagcctcttatagagaggaatcacgcctgtggattcggcaatgtcaaagaactctgtttttaccggtcccggacacaccgccgtcacatagattctccggcttctcagttcctggttcagggccctgctgtagctgaggacaaatgattttgtagccgcatagatggcaaatccgggctgaggcaggaacgccgcggaggatgcatactggatgattcggctattgcattccatatagggcagcaccatgcgggttacggcgcacagggcctcacagtttaaggccaccatgtctgtctcactctttaagcccagctcctccacctgcccaatcataccaaagcctgctgcattgaccagaaactttacctggggcttcctggcactcagtgcccgcaggagcacgtccctgtcacgctcccttgtaagatccagtgcaaatttgcgcaggggcaccccaacctggcggtccagttcatccaggcgctctcttcttctggctatgatccagatctcgtcaaagcccttgaaatgttcccacagctggatgatggtttccctgcccataccggaggacgctccggtcactacagcaatcttcatacctgtcacgttcctttctttttgtggatgttgcgtatggttttcttaggccttctggcttctcctgctccctggcctgccgctttatatccgttgcctctcgcctttcctgccggagcggctgtcccgccgtccctgttaccgttccttggacgaatcaggcattttttatcatatccgattaaatccgtgcgccctgcgattttaagggcttccgtcaccaaatcataattcctgggattcctgtactgaatcagagccctctgcatggctttctcatggggattgaccggtacatagacctgttccatggtccggcagtcatatcccgtgtagtacatgcaggtggaaaccgtggagggtgtggggtagaaatcctgtacctgttccggcatatatcccaaatccctgagatactcagccagttccaccgcctccttcatggaagaacccggatgggaggacatgagatagggcaccagatactgctccttgcccagcctctggttcatctccttatactccttcacaaactggcggtaaacgctgttcctgggctttcccatgcgggtcagcaccttgtccgccacatgctccggcgccaccttaagctgaccgctgacatggaactcacacagttcctttaagaatttccggttggaatccgccagcacataatcaaaccggataccggaacggataaataccttctttacttttggaagagccctcagctttctaagcaaagcaatataatcgctgtggtccgcccgcaggttcttacatggttcaggaaaaagacactggcggcccggacacgcgccgcttgtcagctgtttttcacaggcagggaaacggaaatccgcggtggggccgcccacatcgtggatatagcccttgaaatccggttcctcggtcagaagccttgcctcctccaccagggattcgtggcttctggcctggatgatgcggccctgatggaaggtcagggcgcagaaactgcatgccccgaaacatccccggttgctgatcaggctgaacttgatttcccggatggcgggcacgcctccaagctcctcataggagggatggtagttcctcatgtaaggaagagcatatacctcatccatttcctcctggctcagtggcttggacggagggttctgcaccacaaacagctgattcccataaggctccaccagacgtttcccggaaaacgggtccgtattgctgtattggacatagaagctctttgcatactccttcttgtcccttaaaagctcctcatagtcaggaagcatcttataatcatagacagattccaggctttttgtcttatataccgtaccgtctataaatgtaatatccttcacgtccagcccgctgtccagggcatcggcaatctccacaatggaccgctctcccatgccataggatatcagatccgcctgggaatcaagcagcacggatcgcttcagcttatcagaccagtaatcataatgggcaaggcggcgcaggctggcttcgattccgcctatgatgacaggcacatccttatacgcggaccgtatcagattgcagtacaccaccacggcatagtcgggccgtttgcccatgacgccgcccggtgtgtaggaatcttccttccgccgttttttggacacggaatagtggttcaccatggaatccatatttcccgccgataccaggaagcccagcctgggccttcccagcacttcaatgctctttttatccttccagtccggctgggaaatgattcccaccttatatccgcgtgcctccagcagccgggatatgatggccgtgccaaaggaaggatggtccacataggcgtcgccggacacatacacaaagtcgcactgcttccatcctctgatgctcatatcattccggttcatgggtaaataatcgtttttcatcctgccgctccatccaataattcataataatccctgatatagtaatctgccagctgttccttctccgccttcatctccaatgaaaatgcatcctccacagcaaagacagtcatgcccgcattttttccggcctggatgccggcaggcacatcctcaaaaaccacacagtcctccggcgccaccttaaggcgctcagccacattcagatatatatccggggcaggcttgccggcagccacctcacaggctgttgccaccaccttgaagtacctgcggatgtccagtgaatccagcaccgcatccaccatggcccttccgttgctggtggcaatgccggccaccagtccctttcctgagataaattccaggaaagcccgcgctcccggcttcaaggttacttcctttctgtacttctctatggacatctgaatccaggcgttctttatctcatccagggattcctttaaccggaaccgttccttaaaatacaccgcagtctcagaaaagctcattccctcgatttccttctgcaggtcatccgggcaggcaagaccaaacctggccaggtattctatgtcaatcgccttccacatccacatggaatccaccagcgtgccgtccaaatcaaatataactgcttttttcctgtttaacttcatctttccctattttcctctgtctataaacatgttgacaagttttccgtgactcttattctgtgactcctatatagttatacacggtttccccggttcccgcaatcctttatggaagcctcctcctgcagagtcaggggacggtattcccccggttccagatttgggtccaggataaggggtcccatggatatccgtttcagatactccaccctgcaccccagcgcctcaaacatccgcttaatctgatggaactttccttcccttatggtaaccagtacttcctgcgcgtcttcctccggtcctgctccttttagtatcttaagctctgccggaagggtcatggtgccgtcctccagtttgattccttcctcaaaccgctttacggcatcctccggcagccctcctgacacatgggccagatataccttatccacatgctttttaggcgacagcagattgtgggccagctccccgtcgttggtgatgagaagaagtccctccgtgtcaatgtccagcctgcccaccggaaacaggtcttttctcaaagcctccctgataagacccaccaccgtcgggtatttcctgtcctcggtggcagacaccacgccctggggcttgttgagcatatagtactccattctggcgtacgccacccggctcctgtccacttctacaatatctgattccgggttcaccttccggtccgcgtcctttaccgcctctccgttcatccggacgcgtcctttcttcaccatatcctttacctgggtacgggtcccgtatcccatctcagccagaaaccggtcaagacgcatcggtccgtttttcctgcctttatcagccatcggtccctttcctcccattgcgttgtttaactttagatgctttcatacggatggctactgccatctccagccgggatagtacttattcttcaggctcatccccgtacctttggcccagccaagaggaaatccctccatggctgccaggcaccatcccttaaccggtccttcatccccttccagggaaatagtctcccccttcagatagcggagtaccctgttgtcaccggcagggaagctgacggtattcggaaactgcccggccttcatggacatggccagggcctgggatggttcaaaccgtcctttttttagctctcccaaaaaaagccccgtgcgcaggaatctcaggggcaggttccatgcaagtccctccggcagatagtagacattgtcctggtgtatgacaatccgcccataatcccactctgcgccgctctgccttaaaaatgcatccagctctttttccttctccacagcccggacccgcttcctggctgttccggggtccatggggggcagtatctccttacccccgtcatccccgcccttttttcgcatcagggccagaaaatgcccctccccttttaagcggtgcggaaagagcctcatgcagccgggaagcccaaacccgccgcatgctcccggcactttatcaaggtccagacagcacagctgcatctgcggaaattcctccaggacataggccacattcccctcatcctcctccacggaaaacgtacaggtagaatacagcatatatccgcccggtctgagcatggctgcggcctgggacagtatctggcgctggatgggcacatagtattccggtcccttttcattccagtccttcaccatatcctcatcccggcggaacatgccttccccggaacagggggcgtccaccagtatcttatcaaaaaactccggccacacgccggccagcttttcaggcgcttcactggtaacgcagatgtttgccgcaccggccagctccagatttttaagaagcgctctggccctggaatagctgatgtcattggacacaagcattccccggcctttaagctttgacgccagctctgtgctcttgcctcccggtgcagcgcaaaggtccagcaccctgtctccgggaaccacaggcagcatggctgccggggtcatggcgctgggttcctggaggtaataaagcccggcgtaataggccggatgcttggagggtcttaatacctccccgtccagcgtcccgtcataataaaaaccattgtctgcccacggcaccggctccaggttccacggcaccagttcagccagttcccccggggaaagcttcagcgtgttcaccctgagaccgggcttccactcctctttgaagctttccaggtactgcccgaactcctcccccagaagcttctgcattttcagcagaaaggcctccggaagctgtctcacatccgtcatatcatccgccctcatttctttataacagtacaggtcaaaactgtcacaattgtatttatcatatcacatccgccgtgattctgccaccgtgcgtttctttccgggaaatcctggaaattttataaaagtaatagggcacaatgggaaccagggccgcaagccaggccgccgggtccgccaggcacactcccacatacccgaagcttcctgccactgccgccacaatagcagccctggcaatcagctcaaacacgcctcccatcatgggcataagtccgtatcccagaccctgcagggcatttctgtacaggaaaatacttcccaggaagggataacaccatgccactgctctgaagtacgttctggccgcactcattacctctgtctccgatgcgtcaataaatatatggatcagcatatccccgaataaatggatgaccagaatcataacagcgctccagaccagaatcataacctgtatggacttgaccccctgatggacgcggtccatacggcctgcgccccggttctgccccacataggtggctgccgttgccccgaatgccacaaacacagtggacacaatgttttgtatcttacccgcagctgaaaagccggcaatgtacacagacccaaagacattgacggccccttgtacaatgatagtgcctatggctgtgatggaaaactgaagccccatgggaatcccgatggacaggagccgtcccataatgccgaaggagatacgaaaatcctcccggctcagcttcagtatatcaaatttcctcacaatgtagagaaaacacagaagggctgaaacggcctgggcaatcacggtggcgtaggcgcagccctccactcccattccaaaccagatgatgaaggccacatccaggagcacattgatgaccgcggaaataatcagaaaatacagcggtgaacggctgtcccccaatgccctcataacagccgccagcccgttgtaggcagccgtcgcaaaaagccctgcgtaaatcacagccatataaccggccgtgtcatctatgattccatccggcgcgttcatcaggcggagaatgggataattaagtatctccagcgcgattgtcatgaccagcacaaaggccaggcacagatagatggacatggccacattgcggcgcatcctttcatatttcccggctccgaaatgctgggccaccataatggaaaaaccgctggtaagaccgttgagccagcctatcaccagaaaaataagggatgtggtgcttccgatggctgccagggcatccactccgatgaaacgccctgccaccacggaatcagccaggttataaaactgctggaatatgtttcccaggcaggtgggaatcatgaactgcaaaatcagttttgccggctttccggttgtcatattattagtcatatagttatattctacctttccaaaaatagcaggcatcattataatacaaaatcatggaatattccagttgttttttatctgcttaatggtatactggaaaaatcagacttagacggacatttgcagggcatttttgcatgattggcagggagacacactgtatgaacggaaagaaacttcgctacgggttggtatttattgttttgaccacacttatatatatgctcatggagcttcgctatggccttcccatccggcctctgcgtccaaagcattatgctgccgcggctgttctcgccgcatgctcctgcctgattcacagcaggcgggccgcggcatccccgggttatgcaggggagctgttattaggatgccgtaatcagcccggacgcattgtatatatggattatctgagggtactggcttccttcctggtcatcctcgttcatgtactggagccggcttatgccctgcttcctccccataccttttccagaaatgtgatggctgcggcggccggtctgggcttaagctgcaacctgctgttcatgatgctcagcggggcactgctgctgggaggaagggaggaatccgtcttacaattttattcccggcgctttgtcagggtgctgattccctgttttgcctattacctcttatacttcttttatgtggaaggcatctttgccctcagtcctggaaactggggtagcctgatacagagcttcctgtccaatgacagcggccagacacctcatttctggctggtgtatattatcctgatgttttacgttgcagcaccctttttccgaatcatgttaagacacatgacagaacccatgctggaggcactgaccgctgttatctttatcctgcatttcatctacacctacggccctctggttcatatacagtttgcagcctcctccttcctggcatcatgggactccattttcctgctgggatattactgcaccacccggtctgccatgaagcattaccggctattcatgacggcaggcctgttgtcagggctggcaatagcgggctccatcatggccccggagagcctgggccccctggtttacaacaacgcgcctccccagatgctctttacctgcgccgtatttctcttcttccgaaaacatggggaccgtctgtttgcaaggattcccaccctgctctccgccataggcaggtacagcttctccattctcctgattcactggctggtgctgcaccggattgtgggcgacgtgtttggcattaacggcctgtcctttggaattgcaggcggcatactggtatccttcctgcttaccctggtcatcagcctggccctctccttcctgtatgacaatacggtagtcctgtgcatggacagggcctgtgagattttcttcggagtcttgggacgtgtggggaaacggctggggcgctttgcaaaatagtcatgctgacagttatgctgtatacatgccttccgggcgcagtgaaacgggcctttcatgatggttttcatgaaaagcccgctgtcttttatcctcttactttatcctcttttttatccctctatttcatccgcggtgcctggtttcagcggtgcatagtttcagcggtgcttggtttcatctgcagggacagcctggcatcctccttcaggaacaatggaatggtatccagaggcgcatctgcctcaatccgcgttccgccgtcatataccatgcccgttcccgcgtccttccacctgcatccctccggcagatagaccatccgctttctggctcccagctccaccaccggggccaccagaaggtccggtccgaacatatactcatcccctatgtcatatacatttttatccccgcaaaaatcgtaaaacaaaggacgcatgactggtgttccgtcttcagaggccagcttcatctgccccatgatatacggctttaattcttctctgacatacatataccggcggatgatttcataggcctcctcaccaaaactccatacctcattgggacctcctgaaccgcagtaaccgtccggattcaatatatcccttaccggatagggaagcctgaatccgtgaaggcggaatatagggcagaatacgccgaattcaaaccatctaatcatcagctcccggaattcttccgactccggatccccattgatgaacccgccgatatccgtggtccaccagggtatcccgcacatggccacgttaagccctgccttcagctgttttctcaggctgtcaaaggtggaagcaatgtcccccgaccatagtacgactccataccgctgggagcccagccatgcgcatctgaccaggttgcacacttcctcaccctgggctttcaggccgtcgtaaaatgcctttgcaaaccccacgcaatagatattgctgacctcctccccgtttccaaggtacatgcggacattgtcgtaatcatagggccgcatctccggctccgcctcatccagccagaaagtacggattccatagtcatagtaatttttctttgccctggaccagaaaaattcccgggctcccggatgggtggtatccacatatgtctggggaccaaagaacataaataccacgtccactccccgctctcccctgagaatgtaattatgctctctcatatatgcataattttcacttcttgggtctatggtaggccagacggacaccatcagtttgatacccatggactccagctcactgaccatggccttgggatcaggccatttctcaggatcaaacttccattctccctgcatggtccagtgaaaataatcaatgactatgactgaaatgggaagtccccttcttttatactccctggccacctgaagcagctcctcctgggtctcatagcgcagcttgcactgccagaaacccgcggcccactcaggcagcatgggagcccggcctgtgatggcggtaaatttctcattgatctctcccggcgtgtcccctgctatgatcacatagtcaatctgctttgcgcactgtacatgccacatggtatggttgttgacaaattcagcgcggcctatggctggattgttccatatgaatccatatcccctggatgaatatgtataggggatggtgcattttccgttcttctgaagcagctccaccgtgctcccctttaaatcaaagcagtcattggcgtcctgtcccattccataaaaatgctcgcccggctccgccttaaagtacaggcttatcttaaactgattgcctgatgtgaccctgtattccctggccctgcggagaggggccgtgtgtacccttccgtcaatccagtattcctccagaagcacctttcctgtccgggtgttccggtaggtgacggtgccgtcgcccgtaatcgtcacctgtattttaccgtttgtcatgcaggccttttcatcatccgcttctatgataactccctcaggagaggccggttcctccagagtccagttgagagcttcatcaatgcgcaggctcttactggagcggaaccgtatggcgtcccttccgtatggttcgatatagaccagctctcctgccgtctcccatatgatgcggtttccttctgtctttccctcatacctgggtattgtgtaatatgccacttactgctctcctttctctatgaccatatggatatcatggtcctgcatccgattgcccatatggatataagtccttttatggtccatcctgaaaccaatgtcctgtccgtcagcctgcactccggccggtcttatgttgtgcaggacaaaggtaaggttcatgtccgttctggtgcagtcaattttgacccggtcagccgatgcgtacatttcaactgtaaatccgtgttcataggaacagagccgtcctttgccctccattggataacagtggatttcccactggtcatcttccttctgtcctatatattccatttcaggcccaatggggataatggcgttctcccttacatagaccggtatcttatctaacggaaccacctgttccatccatttcccgccttcctcaaccgtatcgtcgtaaaaatccgtccactgaccccggggaagatagattctcactgaattatcttcatttaacacaggaatgaccataagctcttttccaaacagatactgggtatccagaccggccgcgcttaaatctgacgaatagtcatagaacaccggcctgtgtatcagtgtgtcctcttccctgacagccagggcctggttatagatgtatggaatcaggcggtaacgcaggcccgcgtatttcctgtaaacatcaactgcctgctggccaaaatcccatggctccctggaataaaagccatggaacctggcgtgggagcagaacatgccaaattccagccaccggatataaagctccggactgctctcaaaccagaatccccctatgtcgctggaccagaatggaattccgctgagggacaggttcagacagcctttaacggagcttgcaaggcttccaaaatccgttcccgcatcaccgccccagtgaaccggatatttctgggagccggcccaggcgcttctggcccatatgagggccttatcttccccaaattcctccttagcggcctcgtatgcggccttattgtacaacagggcatacaggttatgcacgtccctgccgtcggcgcctgcatacttaaaaaatgccggggcggattccccaaagtcaaccttgatgacatccacgcccttcctgagcaggggttttatcagtttttccttataccagtgaactgcctccggattggtgaagtcaataagtccgtgaggaaactgaaggtcaccgtccggatttccggcaaaatatccgttggcagccgcctcatcataaacctcataggaggtctttccccgttcaatatagggaagctgccagagggacagcttatatccgtcctgatggagtttttcaatcatctcctccacctttgggaattttttctcgtcaaacttccagtcacacacccagttttccgtaaaccagtccgtatcaatatgtatgacgtcacatggaagcctgctgcttctcatctgtccggccacccgctccacttcttccctggtgccgtaactgattttactcatccagatgccgaaggaccatttgggaggcaccgcaggcagtcctgtcagcctgtgatacgccggaataatgtcctttatcgtgtcccctgtcatcagaaaataatctaacagagctccttccaccatggtatagcttgccttggataaggttgcgcccaaatcacaccgtattttcctggatgtattataaaaaatcccgtatcccctggaactcatataaaaaggaatatatttatatcccctttccgtgtttaccccaagggaattggtgttccacaaatcgaacagtcggccctttcttgacacagatgtaaaattctcccccaatccgtaaaactcctcatagggatcggaccatgccgcctcacaggcatattgttcctttgtatttctgtcaaacaggaatcccatgggacaaatctcatagggcataaaggaatggcagtccctgccgaactggcggtatatgacctccccatccctgtttttgacagaaaggttccagggacttttctgaatcacagctgtcatacatccggttgccattacaatctggccctctgattcagaacaggtgacgctgcattccgtctcttccatatccccaatcatttctgtcctgttttccggcacacaaaaaccctccgccatggtgacccgcagcgtattctcattgacaaatctgagccgtatggaaagggtactgcggtttggcttttctgtaaacacatggcggtaatccagatacctgtatgtataattttcatccacatacaagccctctgccaggatatcacatccctttgggacaggggtgcaggatttcaccctgtgcaccagcagcatggtcaggttctttgaccggctgattctgggaaatacaggcatgttctcaaataattcttcctcacgggctatgttttcttcggatagaccgtgcatgatttctccaaggcttttctccatctttttactcctctcaccctttgactgagccggcggtcagaccgctgactatgtatttctgcagacagataaacacgataacaatgggaagcaccactacggttgagtaggccattaaaatctcccatctgactcccagctcgcccatggccttgtaaagaatcagcggcagggtctttagcttttcctgattcaggaatgtcagggagaacaccatgtcgccccaggacatgaacagggccatggaagtggctgtcacgatacccggatagctgatgggaaccatgatgcggatgaatgtccccaggggaccgcatccgtcaataatggcggcctcctccagttctttgggtatgtctttaaaatatgtcctcagtatgatgaccacaaatggtatggtaatggttgcgtcggacaggatgactcccagatgattgttgattaaccccagtttgttaaaatttacaaacagaggcgtcaaaatcagtgagctgggcagcatctgagccaccaggaagatgaacaaaagcacgcttatcatcctgcttttaaaccttgccagcccataggaggccggaacccctaaaaccagggtgagggctgttgccccgaacgaaaccacaacactgtttttaagatatgtgaacaggctgatcccatgttcatttttcaggatatatgaatcaaacacaatcctgctgggaaaaaaggacgggttggaaaaggattcccccggcggtctgagcgatgtggccaccatccagtacaaaggaaacaggaatacacaggtaaccagtatgcctgcggctgtcagcgctgccttcctccggccttccatacgttttctatccttcatagtcctcacctcctaattttcgtcttcccgcgtcacaatatgaatataaatcattcccaccgccataagcattacaaacagaatgttggccacagccgctccctgggagaagttatattcactgaaggaatagcggtaagccagggtggacagcatctccgtggaagatccaggtccaccccccgtcatcacatacaccaggtcaaacaccttaaaggtatagatgaatcccagtgttagcaccgatatgatggccggcctcaaaagaggcactgtaatataaaagaatctttgtattctggtggctccgtcaatactggctgattcatagatatcctggggtactgtggtcagcgccgttgccagaagaatcatgttaaacggaactcccttccatatgtttgcgattatgatggctgccatggccgtattcccatgtgccagccattccaccggcttctgaatcaggtgcagccccatcagtatacggttcatgattcctatatcgctgttgaacatgtatttgaacacaccggctaccgcaaccatgggaatcatccaggccaccacattgacggcccgcaggggtccggctcccttaaaatcctggccgaaaaacagcgccatgagaaacccgatggggaattggaatacaagacaccacagggtgaataccagggtattctttacggcaatccaggtgacctctgtcctgcatattttctggtaaatcttaagtcccacaaaatggctgtcacctgtggcaaaattcatcaaatccacattcttaaagctcatgattatattgcttataatcggaaaaataatcatgatggtcatgaacgctgcacccggcaggacaaacgcaaacagtgtcagcttcttcttaaagaaatatcctttcttacttcccatcttcccactccatttcgcaaaaagggcgctgctgcgcgccctcttctttattcgctgatgatttccgcaacctctgccgctgcctgcttcagtgcatcgtccactgatttggcacccgagagcacatcctggtacgcaaactgaatcgcactggaaatctcaggccatttcggatgaggccccctggccttggcaagctttaactgttccgtatagaccgaaagaattgggtcatccagccacagggtactctccgccacagcatcttcccttggtgatatgtaaccggcatcctcacagaatttcctggaattctctttgctgctgaggaatttcattaattcccaggacgcttccctgttgtcatccttcatcatcatgatgttccctccacctatgggagaagcggcatttttgtagttggggaaggtaaccacgccgtaattcagatccgggttctcattctggatattggtattcagccagcttcctgccaccatcatggccgacttgccggttgcgaacagagaagcgcacatatctgcctgggtcatggatatcagctccttgctcatatatccgttctggtagaaatcattaatcatggtaagggcttccccggccccctctgaatccaggctgtcataatccgcccctgcctgccagataaacggaagcacatcaaaggtcccttcctctgatttaatcagggacattgtaagcccgtaatggtctgccgtggttgtcttggccgtcatgtccttaaagtcatcccaggtccagccgctgtcaggatactccagccccatttcatcaaaaatgtctttattatacatgatggcaagacagttgctgtaatagggaaccccgtaatacttatcctcgtaccgggcagagttcaccggtgcctcaaaataattctccagctctccccaggcctccacctcgcttgtgatatccatggctgctcccatggctgcaaatgaaacattgtccacggtatcacaaagcgtaacgtccggcagctgatccgcagccacgccaatggacagctgtttcttgatttccgcgaaagccacgctctgggtttccaccttgatgccgggatgcagttcctggaactcatcaatcatctgaagcagaagcgttgcctggtccggagaaatgtgataccacatttcaatggtggtctgctcctgtccctgagacgcctgggtttctgcggtctgacctgtggtgcctgcgtctgtgctgccctggctggtactggtgccggagccggaacaccctgccagcatcaccgctgccagcccaagggcaattcctcttgtgaataaacgttttttcatgtaatcccctcctgtattttctgtcatctgatgtcttaagtatatccatttaatccaatttagggaattccattattttaacttcattttgatattttaaccaaaatacattccacttttttaaaccatattgactattttgatggttaaaattataattaagccacttattagtactacatttcggcgcgaggggggatttatgtgagaaaattcatcccatggataaagggacattttttatataaaatacgataccagattaccattttcctgttctttgtgacctttctcccggtcatcagcattcagctttttaactatgaaaagacttccgaaatgctgtttactaaaaaccactccctcctggcagataacctgcagctgacccagaacagcatcaataacgtgctgacggattacaaacgtatcctgttccagatatccaccgatgttacctgcatggataatatactggaactgtccaaggtatctcctgattccgcagaatacaggcgcatctctgagtcgctggaaacatatatcaaagccaatattctcatgtacccggaaatacaggcattgtgtgtcatcagcaccaccggcaccccctatatctacgttcagaaacgccagaaaacccagccaatcatagattattttgaggcgaataaggaagaactgaaccagcttcttctctcgtcgacccgttccatcattggttccgtccacgacggcagcccttattatgacccagagcacccggtattctttctgggcagcagaaccatacattatgaaaaaatgaaaataaccggcagcatacttctgttcatctcaccggataagatgaactctgccatcaataacccggattcccaggtctatccctttacggataaactactggtggattcctccggaaggcttatctgttccaaagacagaaacaccggaaaaatccttggcagcctggaaaactacaaagccatagactgggacagcctctcctctgactccggggacatgcagggggattatctggtatcccagataccgctggagcattttgacctgcaccttataaatatagtggattacagacagatgacaaaggacctggaggcgctgtggaccaccattaccctggccatatcagccatcctgctggtgtccatgctggtcgcctatgtgctctgccacaagttcatattctccattgaaaatgtggccgccaaaatgaatctgtttgacgagcatcatctggatgtggaaatcaggaacatgagcaggaatgagcttcgcatcatagaatcttcctttaaccggatgctggggcagatccggggcctgttggatgaaaacaagcagcagtataagaaaatctgcgaggctgagttaaaatctctggagctccaaatcaatccccactttttgttcaacaccctggattccatctgttggacggctgcccaggaaaactgtctgaccgtaagcgaacagctcaacaagctggctgccattctgcgccacacagtatataatatgaactgcgtggttcctctccaggatgaaatctgctggatgcagaattatctggatttacagaaaagccggtttcacggccgtttctcctacgacatacacgacctgacaaagggcaggcgaatttatatccataagctgcttttacagccgtttttggaaaacgccctgattcacggatttgaaaatctgccccgcaagggccgtctggagattgcctgccgtatcaccggacaatcccacctgctccttcaggtgtctgacaacggctgcggcataccggaagataaggtgagggaaatcaatcttctctttaccacaggacggtccgcctttaccggcatagggctgactaatattgcttaccgcacaaagggctattatcctcacagccgtatttttgtgtcatcctctcctatgggcacctgctttaagatatttataccaatgaatgaaatggagtgaaaaatatgtttcgattgttgattgtggaagatgaagaaaactcaagaaaagggctgaaagccacgcttgcccccataccgaacctggaaatcgacactgcctgcgatggacgggaaggctgcttaaaggccatacgatggaatccggatatcattatcagcgatatccacatgcctgtctgggacggacttgtgatgacggaaaagctctgcaaaaagggatttgcaggcaccatatatctgctgaccggatacgcggaatttgaatatgccagaaaggccctgcaataccatgtggaagattatattctgaaaccggtggtcccctcaaaactcaggaatctcattgaagtcaaattgaaagacctgaacaaaaaaagaaacagccagaatccccagctatgccatctcttatccgatgaagattcggtgcttctcacggaacgcctggcccccttctgctatacggattattttttggccgtggtctatatggaacgggaacaccatcttcccctggaggtcaaggaagctgtcatagaagagcggggccattatatcctgaccctgccggataagcactaccgtggcatcctcataggctttacgaaccacatgattaaccacggcaaaattgaccgtatttcatccctgctggagccatacgagcatctgacctgcatttatgaaacacggcaggctggttttatttcaaactggcttcttgcctttgaacagctccggagtgccattccctggaccatcacctgccgctcccgctttctgtcctacgatacatacatggagcaggaggcgggagaattaaacgaggatgtatttttcaagaaggacctgcagcgtatgctctgcggcggcgactttgacggatgcaggaaaatactgctaaaaaaaatcagccagatgcaggccaatgcctgccatcccagacatattcttgccgctgccgtatccggcctggtcaagtttgactccaaacaggcctatctggaggcggtaaaccagatggcggctgccagaaccatgcatgaaatcaggacctgtattgattcctattatgagacatgcaagggcagacccgcgtccgccggctattccccactgatacaaaaggcccttcatgtgatagataagagctataaagaacctatttccctgaattccgttgcggaacagctcaacatcaccccccagtatctgagccggttattcatgaaggagatgtcccgctcttttgtggattatctgacctcctaccgcatggagcgcgccaaaagcctgctccaggatacaaacatgaaaatcaacatgatctgtgtccaggtagggtatcaggatgccaaatatttctgcaccctgttcaagaaaataaccggagtgacccccaaccagtaccgcgccagcagccctaatatgtaaacaccagccgcttcttttccagccatttgagaatccagtaaggattcacgctcatttcctcattgtggtccgtcttaatataaatccccacatggagatgaacatcaaagttccccctggttccctctgtctttccgtatcccgtatcccccatgtatccgatcagctcccctgcctttaccctgtctccttccttaaagtctccggcatagctatagaggtgcgcatagtacaggtaggctcccccgggagcccgcacgcctatgcgccatccccccatttccagccaccctattttttcaatgattccgtccgtcatgctgacaacaggataatatccgggcggcatttttgagcccatgatatcgcagccttcatggcggcgttttgggctgtttttccggccaccgttctctctgctgttgtcccctccgccgttctccccgccgcttacatatccccgcccgtccatccagccgttctcaaacgccacctccggcgtgtccttattccggctctctggaattggaaagtactctaaatcccccaggacggtctcatatgcatgtttcagctttcggtagtccgcaggcctggccgcagccagcagcctgttattatatctggtgtccttaatgcctgtaaggtcataatcatgttccaccatcagggtggcaaccatgtccggatccaggttgtcaagccctgccaccgcatctcccagactcatggccctgaaatcatcgctctcccaggaatacggccccagctggtaataatccggattcgcaatcagataattggtaatggaacactggaataccgccagcagcaaaataagaatcaaaggcatagcccgccaccctttacaatatatttgtataaaccattgtattcaggtgcgtatgaaaaaatccataggaggcgttctgtctgtcctctgtctgcttatgctgttattcaaccccggacttgcactggaaggtgccaggcagggtcttgtactttggggaaatgtagtccttcccacgctccttcccttcatgatatgctccggcgtcatcgtggccatggatgccatccatatcctcacaggaccctttaaacccatcctctcaggcatcctgtccctgtcagaccagggcagcttctgcctgatgagcgggctgttatgcggttatcccatgggtgccaagaccaccagcgactttttagaccagggcagactctctgttcaggagggaaaatacctgctggccatcagcaatcatcccagtcccatgtttgtgctgggatatgtaatggcccagattgccctgattccctccatggcatccccctgcccgctgtgggctgtcctggcagccctgtatcttcccatactccccatctccatattagccagatgctgctatcattacaaccggcagacccgtgaggaagcatgccctttggcggcacaggcagcaccggaaaaaacagcctgcttttcctttgacactcacatgatgagctgttttgaaaccatggtcaaaataggcggttatatcatgctgttctctatcctggctctgtatctgaccgtgtttccgtttcagatgcctcccctgctccgcccggccctgttgggaagtgtggaaatcaccaccggcatccagatgatagcatcctccgtgcccggaagtatgggagccctacttatcattggctccgctgccttcggcggattttcaggcatatttcagacaaaaagcgtattaaaaaatgccggattgtccatccggcattatatgctgtggaaaatgctccacagcgcgctgtcctgtcttatattttatgtatccctgtgctgatagcctatccctgtgccggcagcctatgcctgctgctgggcgtcatccatctcctgaggcgcctggccttcgccctcctccggcctcacaatgcctcctgacaattcattccggtttgaggaaacaatgtcatagctggactgcatggaagacataaaggcgtcaaaacgtccccttgccccttccatggtatggttgatgatggtctggagactgcggagcatgtcgtctgtatactgaatggaactctggcggattccattggcatcgttcacagcagagtccacaatggcctgggcctgtatgctggcctgctccaccacttcgttggcatgggcatatgcgcgctgcatgatttcatgctcattaatcatctccgaagtctgttcgctggcctgggccaccatggaatccgcctgcttcttggcatcatccagcatggcatccgcctgggcctgggcttcattcaaaatggtttcctgctggctgatgattttctgatatttcttaatttcatccggtatcctgagtcgcagctctaccagcagttcctccagctcttccttattgacaataattttgctgtttgataatgcctggaacttacagctgtctatatattcctcgatttcactgattaactgctctatcctactcatcatgtcaaccgtctcctctcctccagcttctctcttaccctggctgcaatgaccggatggaggaattcactgatatccccctcgtactccgcaatctctttcacaatgctggaactcaaatatgaatattttaaattcgtagtcaaaaatatagtatcaatctccggcgcaatgaccctgttggtctgcgccatctgaagttcgtattcaaaatccgtaatggcccgcagtcctctgaccacgatatccgcatgactcctgcgcacaaagtcaatgagcaggccttcaaatgactgaatctccacgttaggcagggatgaagtcacttcctttaacatattaacacgttcctgggcagaaaacaacgggcattttgccttattgttaaggaccccgatgattaatttatccaccatctttgctgtgcgctctatgatatcataatggcctaatgtaaccgggtcaaagcttcccggatatactgctgtcctcatctactctcctctgccaacgaacacatgcttgttggtcttgtactctttgctttttatcatatgccatccggattcttccagccatccaaactcagtttccctggatgcctcaattacaatcagggtttcctccgtaaccatgggggaatggttcagataatccagaaccagccgttcatactcatgattatagggcggatccataaaaacaatatcaaacttgtaattcttgccctccaggcgcttcaggccggttatcacatcacagcccatcaccatggcccgttcctccagctttgtcctgctcaggttctcccggatgcactccaaagcctttggattgttctcaatcattacagccaaaccggctccccggctcagcgcttcaattcctatggccccgctgccggaaaaaagatccaggaacatgcagtccgccaattccggctgaagcatgttaaacagcgtttctttgattctatcagtggtgggcctggtatccagcccatccagtgtctttaaaagcagccttctggcactgcctgcgattactctcattcaataactcccgcttccatacgccgcacacttgcagcaattttcataccaaacaagtataatatgaaaattccagatatacaagggtttttttaggatttttgcaacatttccctcattatttggaagcaggaagcccctgggcaatccgtccggtaaattccgcaatgttcatggtctgcatgtataccttgccagggcctgtcagttttgtgaggaacagtccctcgccgccgaacaggatatttttcacacctttaactgtctcaatttcataggatatgccgggttcaaaggcaaagacatttcccgtatccaccttaatcacttctccgggggccagaaccctctccaccacatctccatccacctccaaaaaggccatgccgcttccctgtatctgctgaagtataaagccctctccgccaaagaatccggccgtaaacttcttagtcagtacggtattgatttctacggttgtctgggcgcacaggaaagctcccttctggcaaatcaggctggtctttgccgtatctatggccaatatcttccccggcacagtggatgcaaacgcaatggtactgtccggcctggacgccgtataggtagccataaacagggattcgccggaaaacatccttcccagtcccttcataagccctccctttacattggagtccagtgtgaaaccgtcgctcatccatgccatgcctccggactgcgtatacatagcctctcccgcctgcagcctgatttcaacggccggcagtatatctcccaacattctgtagtccatgtagtgtttcctccttagatgatttcatttgtgtaacagtataccatatgaagtgttaaaatcctttacattactcttaatatttatgattgaaaatcatcggcttagggtatccaaaataacctcccatttattggtatcaatctccagaaatctatatctctgcctactatctttccaaatacctgcccacaaaccgaaacacccggtcccaatactctgccccgcccaccagcgctgcctgcacatgggccgcgcctgccactgcaagacattccttttcgctcctgcaggcgtcatagagctccttcatcatctcaaagggaacaaaccggtcctccgtgccatggataaaaaacatgggcagtctggtccctgccacgcatttcaatgcatccgcctccttcataccataaccagcccttatgcgggtgacaaaatccgcgcagtataaaaatgggaacgcaggcagatggaactgggacttcatctgatatgacaaaaccgaccaggcggacgtataaccgcagtcttccaccgctgcctttacattggaaggcagcttctctccggcagccatcatgaccgcagcagctcccatggatactccatataatacgatttccgaatccggatattgcctcacaagccagcatatccattctttgatatccaggcggtcatgccatcccattcccacatatgtaccccggctctttccgtgacctctggcatcgggcagaagaagattaaatcccgcctgataaaaagccagcgcttcccttccaaaccacatgccggaatcatcatatccatggatcaatacagcccattttttatttggttttttctgtctgcacagatagccatgaagtcttaactggtcaaaagacacgatttcccgttcttcgtactgtgctttaagcattgttactgcttctggtgcatttcgttcctctcccggcactttttcttctttctctgtgccgggcgcgggttttaacagggctgatttatctgtcgatgcatccagggcaatatgaaaaaaatattctccggccagcagtccggcgattgctgtggatattcctgctgttatacccgcagcaattcctgcggtaatacctgcggcagttccaacctccgcacctgtcatagatttcttcatccgataccgcctccttaaaaataaatattaacttctactatactatggcaaccagttttaaaggtctatgcgttctaaaaaagccgatttccttttttaaccaaaatacgaagaaccttctagtttataatttttgaatcatcacataataggattgtaacacaaaacaagccatgaaccactaaacaatttcatggcaaatataatacaaggaggcgttttattatgtctaacaattctaacagaacaaatgtacctgaagcaaaggaagcaatggacagatttaagatggaggttgctaacgagattggtgtaccgttaaccaacggatacaatggtaacctgacttctgcacagaatggttccgtaggtggctatatggttaagaagatgattgaagcccaggagcgtcagatggcaggtaaataaatcctccctttctgaaggatttctgaagtaagattgtatcattgctggaaacagcagaaaatccccagactatgtgttaaacacagtctggggattttgtcattaatttatcatattttcatcatccatttgtcatccctatttctgtcatcggcatatcagtcgtacagatgcagactaatccacatataccactttacccgtacgttccttatcctccttcgtgtcggccgcgtatccaagagcagccataccgtataccacatggtcagccggcactccgaaggatgtcagaatccgacggatggcaggctcatcgcagattccctggagctggttaatccacacagaaccgattccaagggaatgggcggcaaggaacatattttccatggcacacgcatcgtcctccctgccgaagcggctctccttttcattggacggaatgaccagaacctggggctggtacatatcatatccctgacggtccagtgtcttttcaacggccgctgccagcatctggatcttctccctgtttctcacaactgtaaactgccatgtctggagtcccatcccgctgggcgcatgaaggccggcctgtacaatcagctccatctcatcctccggaataggcttgtctgaaaactttctggtacttctcctggtcaaaatcgtattcaatgtctcattcatggtaaaacacccctttctgtttttatacagcggttcttatacagcagttctcatgccgcaattgttatatagcagcccctaaacagcaaatccatataaatccgctacaggttcagcttctcataattggttcccaggtaatcctccaccttccgcttcagctccctgtgctcatctttttccagctgagggtcctcatccagaagccggtttacttcctctgaaaccttttttaaaatattggcatccgtgaatatatctgccagcttaaattccatatccccgctctgacgcagtccgaagatatcccctggtccccgcagcttcaaatcctctgaagcaatgtaaaaaccgtcattggaacggttcagtatatccaggcgctcccctgccccctggtcccgggaacaattgaccatgatacagtaggactggtcctttccccttcctacccgtccgcggagctgatggagctgggccaggccgaaccgctctgcattctcgatcatcatcaccgttgcattgggcacattgacccctacctcgatgacagtggtggataccagtacatggatttcccctgctgcaaagcgctccataatggcattcttttccttacccttcagcttgccgtggagatattccactgtcacagagggcggcagcgctttcctcagggccttggtataatccagcacattctcagcctcaatcatctcgctctcttccaccatgggacagataacataagcctgatggccctccgccacctggcgctcgatgaacgcatatgcttttggacgatagcccggatccaccacacagttctttatggtctggcgtcccgcaggcagttcatctatgacggatatatccaaatccccgtacaggataatggccagtgtacgcggaatgggcgtggcgctcataaccagcacatggggttcctgtcccttgctgctgagaagttccctctgtcccacgccaaagcggtgctgctcatcggtaataaccagggcaaggttgtcgtacaccaccttttcctgaatcagggcatgggtgccgattataatgtccgcctcatggctggcaatcttcgcgtatgccagacgtttttccttggccgtcatggagcctgtgaccagcacaggaaccttttcgattccctgcttttcaaaaaggccggtcatggattcaaagtgctgtctggccaatacctccgtaggcaccataagcgcgccctgatatccattatatgcagcctccagcagggccagaatggctatgatggtcttgccgcttcccacatctccctgaatcaggcggttcatcaccaggccgcttcccatatcgccatatacttccctcagggccctttcctgggctcctgtaagggcgtagggcagactggattgaaaggcagccacctcctccgactcctttatcataaaggcagaatgcctgtcctccctgtgctccttcagacgcctgacccccaccaggaacatgaagaactcgtcaaataccagacgtttcctggcaaacagaagctctgtctggtcagccgggaaatgaatgtgctccatggcataattgatttcagccagctcatacctgcgccttaaatccggcggcatgtactcccgctccatcttccgcatttccagggccatctgctgcgcccgcacaatggtcttattgctcaggcccctggtctgtccgtatacaggctgcatggagccggccagggcctggtagctgtcaggggtaaatacctccggctgttccatgaccatccgtccccttttcttaaccaccctgccgcggaatacgtaggtgacgccggtctttaaatttgccctcatatagggcatgttataccaggatacctggagggagcctgtcaggtccttaagctgcaccgagacaatctgcatatggcccagacgcagcaggtcagctcccctgacaagcgccgactccacagccataacagcctgctcctttaactgccctatggacaccgggggctcgtatgcatcgtatgccctgggataataggacagcaggtcatctatggtgacaactcccagtttttcaaatagtttgcctgtcttctcgccaattccttttaacgagtttaccggctgtctgtttaacatgtatcagaatcctccaaaggaagtcatgcctgtaacgcattgagtcccagctttatgcatcccatgattccctggtcatcgtgaaggcttgccggaacaatgtagctgtccatgtcttccagttcctttgtcttgatatagccgtttaacatctccctcaccttttggcggatcatagggaacagctgttcctggtgcatgactccgccgcccagaataattttccggggagaaagcagcatgatatagtccacaagggcctgggcaatgtaatagctctccatctcccatacctcgggcctgtccaccagttccacggcctttttaccccatctggcctcgatagagggaccgcttgcaaagccctccagacagtttttgtgataaggacagataccgccctttgaatcgtcctcatgacgcgccagaaggatgtgccctccttccgggtgaagcattccgtgcagcagctttccattgatgcatacgcccacgcccacaccggttcctatggtgatgtagataacgctgtccagtcccctggcacatccgtatgtcacctctcccagacaggaaccgttcacatccgtatccagtcccatgggaaccttaagctcagccttaagcctgcccaaaagatccttatgcctccatgccagcttaggcgtgtccaggatatatccgtaagtctctgactccggcttcacatccacagggccaaaggcagccacgcccagggcctcgatctccttatccttaaaatattcaatgagcttaggtatggtctcctccggtgttgtggtgggtatggatacctgctccaatatggtaccgtcttcctttcctacggcgcacaccatcttagtgccgcctgcttccaatgctccaattaacatatatgctcccctttctgaaatatattatttcaatatatacttttgaaacaatgtatctgacatgaaaattataacagtctttgacttcttaggcaactaaatttgtaaatgcccgacagcttctccacacctctctcagcatccttcccttcatgctcttcattcctcccacatctccaaagccgccatcacagccccataatcaccaatctgctcccccaggccgcagggcaggatgcagcaggcatttacactggctgggagcgcctccctccgaagctccttttccatctcgtccttaaggaacctgccggcccttgcataaattcctccggctacaattctctcgggattcagtatatccaccagcatggcaagtcccctgccaaaataccgcccggacactgccaggacttctccggcatccgcgcatcccatttccgcagcttctgccacatccctggctgtgatatcatccagtcctccctctttcatgtacgaaaccggacggcctgccttaagagcatcctctgccatggacctggccagccgcgcaatccctcccccgctgcaaaacccctcaaaacttcccgccttttcgtaacccacaggtccttcctctgccagccgaacatgcccggcttcccctgccatgccgcaagctccttcgtataaccttccgtttaaaaccaatcctgctcccagtcctgttccaaaggtaaggaatatcatgtggcggcagcccctgccggccccataccgccattctgccagggcacaggcatccgcgtcattcttaagtcttgcatccatgtccaaacgctgttccaaataggacacaatcggtacctggtcccagcctggcagattaggcggcgacaaaatcacgcctctttcgctgtccaaaggtcctccgcaggaaatgccgatacagcattcttttccggatatctgatgtgattccaaaaaggcttttcccttatccgccaggcagcccagcacttccttccacgttccgtgagtggggatggcttttctttccagaaattccacgttttctttacccggcctggccagaagaatggctgattttgttccgcctatatcaaaacccaatacatatttcatatttacctcctgtctgtatgcaaaattcatcatgcaaaaagggcgcatcgccgcaactctaatccagtcacgtcaatgcaccccttggataatcatagtattccattaagtatatgccgggtatccctgcttacttcctgcgccccagaatcctcataatatacacaaagaggttgataaaatccagataaagctgcagtgcggagaagatggaggccttggctgccatctcaggcgcctggccgtagtatgcgtggaatgcctgtatcttcttcacatcataggctgtcagtaccaggaacaggaaaattcccacagtcgatacaatggtgtcaaatgcgcttaaatcaataaacattgcaaaaatccagtagaaaaacaggaatacaagtcctccaagcatgaaaggacgaagcttggtaaaattaatattgccaaaccagccaatcaatgccatgattccaaagaacagggctgtgatgccgaataccatccacagaatctccaggctgaatgcaaatagatatgcgctgaatacaatgccgttaagggcggcatacaggaagaataagctcctggccatacccacggacatcttctcaatcctggcggagagatatatcactactcccagctcggcggccagaagtgccagaggccagtaacggaaggaatatatataaaaaatcgttcctgtcattgcaaagcccaccgcaacaataaaggtaaccaaaagccctgcaaacatccagccaaaagtctttgccgtgtagcgtcccagtgagtctccctctacctgaacttcgtaagatctgttcatcatgttttcattcatagtcatccgctccttttaatttaaaatataaatgtaaatgcaaaaatcagattgataatgtaaccgatgatggcagccaccatggcaatggtacccagaatcacagccgccctgcctatattgtttttgctggagctgcgggccttctgtccgaaggtaattcccagtcctcccagcacaatgccgcccagaggcgaaagcagcaggcccaccacaattcccagtatagagagtatcatggctggaacagcgcactttccgtggtcaggcacctgtatggtaatgactttgtttcctgtgtcttcctgtccctggggcaggggctgatggagcaggcgtattaactcctccaggctctcccggaacatcttcttgggcatggcgcccacaaatcccttgatgggattctcacgtttcttaccgatccaggcttccagatgaaagcttccgtcgttatactcataccgtataaaccttgccatggtcagaaagccatcgccctcctgccagacttcctgtcccttgtgggtcttttttttgaacccgttttttgtaagaaagtcctccatcatgaactgcacgaaatcagccggctggttcagttcctcatctcttgtccatctagccattctctcttctggctcctcctttgccttcttccttctactcagcagaaatcagatagtagtatatgggctgtcccccgtactgaagctcgatttccttatcaggatactgttcctgtgcctgttcttcaagaacctttgcctcatgctcagacacatctgctccatagtatatggttacaagctcactttcatcatccagcatctctttcatggcctccagggcaaccccatccacagattttcccactgccagaataccgtggtctcccagggccatgatatccccttcttcaatgtcaatgccgtcaatattggtggtgcggaccgcataggtaatctgggcagtcctcacatttcccatctcctcggtcatggtccgggtattttcctccggtcccagatccggcataaaattgaccaatgccgtgattccctggggaacggtcctggaggggatgacgattatgttcttatcttccgtcaaatccctggcctgctgtgcagccatgataatgttcttgttgttgggcagaatgaaaatgttctctgcatttacccgttctatggcctttagcatatcctctgtactgggattcatggtctgtccgccttcaatcaggcagtcggctccgattcccctgaaaatatcgctcagaccttccccgctggatacagctataaagccatattccctgcgttctgacggcgcctcttccccggttgccttgtctttgtcttcctgctccctggcagcctgttccctggccagacgctccgaatcctgaatgaccctctcctggtgctcctccctcatgttgtctatcttcatgcgggataaggaaccataggccagcgccttttcaaaggccaggccgggatgattggtgtgtacatggacctttacgatctcatcatccgacaccaccaccagggaatcgccaatggattccaggtatgactttaactccgtctcatccttatccgtgtaaaccttctccagatttatgataaattcagtacagtaaccgaatttgatatcggctgtatctatatccgtccttgcagcgcctctggcggctttttcgccggctgccggcctattcccgctgtccggaaccgtgtccagtgaaaagtccactgtcctgcccagaaggccgtccacggcccccttgaccacctgcatcagcccctggcctccggaatccaccacacccgcctgttttaacacggggagcatctccggtgtctggctcagcacataatcgccgtattctataacttgttttacaaattcttctatatcatctgtctgtgaagccatctccaggcccttatccgccatggccttggccacggtcaggatggttccctcttttggtttcatgacagccttgtatgctgtctcggttcccctcaccatggcgttggccagaatggtggtatcaatttcttccactgcttttatttcttttgtaaagcctctgagaagctgtgataatataactccggaatttcctcttgccccgcgcagggaaccggatgaaatggcctttgccagctggtccatggtgggattctccagctccgccacttcctttgccgccgccatgatagtaagcgtcatattggttcccgtatccccgtccggcacgggaaatacattcagttcgttaatccagtccttctttgcctctaacccctttgctcctgccaggaaggcattcttaagcataccggcgtcaatcgtacttatacccacaagttacttcctcctagtcaatcactctaacaccttccacatagatattgattttctcaacctccatgccggtgaattcttctaccctgtatttcacgctttcaatcaggttgtcagatacagccgaaatactgaccccataagatacgattacgtggaaatcaatggatattttattatcatttatatccacattgattccatgagtcaggctctctctctttaatagtttaaccagcccgtccttcatgctgacagctgccatacctacaatgccaaaacattcaactgcgatggttcctgcatataaagcaatcacgtccgggttaatctggatttcgcccattttattgctgattcgtcccttcatacacatgcctccgtttctttactagagacagtatacactattttctgaaaaaaagaaagaaattttaattttttcacttgcaaaatttgcaaacttctggtatcatacatttgttgtggatttttcttaatgaaagaatccaagtaacgtgttaaggaggtgcaatagtatggctaagtgtgcaatctgtgaaaaggcagctcatttcggaattcaagtgagccattcccatagaagatccaacaagatgtggaaagcgaacgttaaatctgtcagagtcaaggttaatggtggaacccagagaatgtacgtatgtacttcctgcttacgttcaggccttgtagaaagagcttaatgaaacagaacatatcacggaaaaagacattgtctctgtcataccgacaggcggtgtcttttttttgcgcaatattcagcctggtatccgcttgtcagtccctgccgcaaaaaaccagacagtaaaaaacaggctatgctcctatgggaggaacgcataacctgtattttatattcaatccctattgtagtcttcttcctcttcgatacgccatacgtttatattaacaacagaacagattatatcctaatacaaggcagccgataacgaacaggaaggtaaagattgtctccggaataaagagcagcactgccatccccagtccaaagcagaacagcataagcccgcatattcttctcatatcttaattgtctcccccattctgcaacaagctatattccatcatatgcagaaaggcggcccgggattcctatttcacatccatatgttctgccttacccgtgtcgtaggttgccgccgtatcctttgcggtttggaccgtctcttcagacacagctggcttcccccccaggaatttgttgataaaatccggcgccatatctatgactttggtgatggcatcctgattctttacgttgacaagcttagttacgcccccctgaatcaccagcacggcgctggggctcatcttagcgctcatgcctccgccgccccgctgtttctgcttgacaccctcagcaaagcttccggccgccataccgcatgtcacatcaaccagagggacaatgatggtatctcccacctgtaccggttcccccaccacggtcttggtgttgacgaactggtccatgcctctaaataacgtgtctatcgtagatgtaaattgattctctgccatagtatgtcctcttctctatttattcccgcgggctgttgggggacaggatatcccatcccccaacagccgccgcgagtgtcatatcactttaagaaacccttcagcatcctgcgggtatgtccgtcaaacaggacctggagtaccagccaaagaattacggataaccgtattcttcctttcaggcttccctctgcgtccagtattttctcatcaaataccgggtacaaaaaaagctgcctgtggtaaaacgggtaaataaggctggcggcctggagcacctgccccgttgtatagggatcgtcaaacccgaaggtgacggtgcacctgccctttctgggccacagatgtaccaggagacgttttgtctgcctgtaaaggagctttaaggacgcctgattcttttcatcctccagccacattttcttttcctgaacaaactccctgattcccttaagcttatcacagattttcgcaaaagaaaacttaagtttttccagtatatgcctgattgactgactgatacggcccgggaagccttttattttccccatgataccgggcccctttttgccagactcaggccctgtctcatcttcctcttccctgctatccttccggttggcgtcctgttctcctgcccgttccccatggagttgactgccatgggcctgttcttcaacggaccggccgccacgggtctgttcaccgccggactgaccgccgtgggtctgttccccgacggactgaccgccatgggcctgttcctcctgggacttcctgtaatgctcctcatcctgctgcagttcctcatacagggactgttcttcatctcccagtatggtctccagaccgtcttccaaatcccgggcaggatccttttcccgattgtgccacagcctgaagcccagaaccttaagactgcacaccaggccttcgccttcataaacagccctgaatgccaggatatgaaagaaccaggtggcgcagaccgacagcagcagctgtccgtggtagcttccctctgccttatacctcacagggatgaacagcactgccaggagaatgccaagcagcagccccaggatgaccagaagaacaatacctattatcttcaatatcacgagcagaatatgaatcatcttgcctcccccaggtacgccatatatgatttccagttaaaaccgtccgtatgccggtacatatcatccaccatggtgcggactacctcacatgcttccccatatccctcggccacgcctaaaatcaggaaatcctctgccttgcgttcttcctctgtcagcagcatcacaggccgtatgtcaagtatatgattcccactctgaggaagagtaatcacataggtgtccggcatgagcttcctttcgcggattcccatgaggaccctggcccggtgccttccggcccggtctcccatatatagatgctcccaccagcgcattcattcatctccctctgtctgcgcgccaggccatgtctgaaacccatttccgccaaggcacgtcctaataatcttcctggtcaaatttatcctgctccatcaacatgcgtataaggcccatggaaatctctttttccttcacatcagagcagcttctgaggctcccttccacatacaaacgcacttcctccagggaatcaaaaaagaccggcagcctggacagaattttggacatcacagccctgacaaggacctttggttttccttcccaggcagctgacagctccccaaagaagcgctccagctttccggccatcagttcttcatccaccttctgatccgccttgtcttccggacgatccagggacataaaggagctgtccgacatgagcagctctatcttcctgagaatctccccgtcctcatccgcgctgtctgccgcgctcttaacctctgtcgccagacgcatccactgctcaaagtaggtctcctgctttccctccagcatggacagcttatctgtcagctcctgcggaatggccgttacggccccttcctcaaaaagagactggacctttgacagcagctcttgtaacaggctttcctctgatacctccatcatcgcccatcttctggaaagcataagcacataaaggtcattgatcaaatccataaacagcatcagttcccccgtggtatccaggagaatctgtcctgcccgctccatctcggctgtcagatgccggtattcctctgctgtgacggccttaaaatccgccctttcaaattccctgagaatggagtgaagatcctcgtatcctgtctccatgtcctccggccgcgccagcatggcctcggacctcaggatatacagcatatcatccaggctggagaccggaccgcccttatagacagacagcccctcctccaccatggcaaagaatttattcctggtaagccgtatgggaagctggcccaccacggactgtatccgttcattgacaaccatcgcctcatctgtgtccgtgatataggccataatttccgctgtccattcttcctcatctggctggacatttctgtttcccatgagctggggctcaaaacgtccttccagacggttcagaacgtactcatacgcctgaaaagcatccgtataagcggtattggcctccatggccgaggcagtctcatcccttaagccattcagctcctccggcttcaggcttccctccaggaaatccttcagcagaccgtggtatcgtttgctcagcctctccagcctgctgcttaaaaggtctccttccaggattacctcgtagtacatatagtaattcagggccagccgtgtatatgcatagtggcaggccgctgaaatctgtttcttccttcgtcttgattccaaacccaattcctcccggaacttattttcacgcaataagcaaggatgctatatccgcctggtatttatttattagccagtatgcaaagacgcgccagatccagtgccttcatcatagcctgttcccgcaccttttcccggttgcccttaaactggtatctcctgacgcaggtttttcccctcaggcagcaggccatgtacaccagccccacaggcttttcatccgtgccgccgtcaggtcctgctatacccgtagtggccacacagaggtcggtaccgctggtattcactccgccctccgccatttccctggcagtttcttcactgacagcgccgtaagctttcagcgtgtcctcacgcactcccagaaggcgcattttggcttcatttgaatatgtcaccataccttccataaacacgccggatacaccgggcacattgaccattctggccgctatcatgcctccggtacaggactcggcagtgcacatggtcagatgattctgttttagcaaatccgccaccgccatctccaggctcacctgttcctcggtggtatagacagcgtccttaaagcggttctttatttccttttccacaggcgcaatgagggccataccctcctcccggcttcccgccctggccgtaatccttaaatgtacctctgccgtcttggcgtaggtggcaatggttggattggtctgggcgtcaatcaggtccaggatcatatcctctacctggctttctccgtatccgcagattttaaccatactggataccagcaccgcgttctgcttttgctggagataaggaaacacctgcctgctgaacatgggatacagttcattgggaggtcccggaagcaggatagcggtcttgccctccttttccagtatcaggcccggggccatgccgttggcattgtccagcaccagcgccccctgggggactgtggccatcttccagttgttgtccggtatgtgcctgtaaatgttattcctgaagaattctttcagatgctccctggtatgggcatcctccaccagaggcatgccgaatgcgtcggcacatacctcttttgtcaaatcatcctctgtggggcccaggcctcctgtcagtatgagaatgtccgagcgtgatagcgcctggcacaccacggacatcatcctgtcataattatcccccaccgtgacctggaaaaacagatcgaaaccaagcatggcgcatttctccgccaggaactgggtgttgctgtttacaatatttcccataagtatctcggtccccacggatatgagttccacagtcatgctacatgcctccctctgtcaggattttgatattctttgccacatagtccaccagggatatgatggtcagggcaaccgcaatgacaaccacaatgtttgtcaccagcgtcagggccggaatattaaaaatcatcagaatgacagccgccatctggaaagtggtcttaaatttgccccagtagctggctgcaatgaccacaccgttatctgctgccaccagacggaatccgctgatgatgaattcacggctgatgatgatgatgacaacccaggccggaagctgtcccagctcaatcaggcaaatcagcgcggaacaaaccagaagcttgtctgccagcgggtccataaatttaccaaaattggtcaccaggttatacttcctggcaatcttgccgtcaaacagatccgtgagactggccacaatgaacagaacattcgccacaatacgcatggtatagttattaccgtggtcaaacaacagggccgcaacaaaaaatgggatcaaacacactcttataatcgtcagtttattgggcagattcatcatacacctctcctatcaaatcatattcagcggctcctgttaccttaaccctcacaaagtcgcctgacatcagttccacatccccgttcacaaatatcagaccgtccacattcggcgcgtccatgtaagtccgtcccacgtaggcaggctcatccaccacctttccttctatgagaaccgtaagcaccctgcctaccatattctcacagtgttcaaatgcaatgtcctgctgcagctccatgatttcgtccctgcgctcctccttcacctcctccggcacctggtcgggataggaaaaggccggtgtatcctcctcagcggaataagcaaatacacccagacgctcaaactccatctcattgacaaagtccatcagctcctcatggtcgctctcggtctctcccggaaagcccgaaatcagggtagtccggatggcaatatccggaatctcctgcctgagttttccgatgcgctccatcagctcttccttgttggtcctgcgtcccatgcgcttaagaatccggtcgctggcatgctggatgggtatatccaggtagttgcacaccttttcctctgtccggatggtctctataagctcatctgtgatttcctccggatagcagtactgaatgcgaatccagtagatacccggaatctttgccagctccctcagaagtctcggaagacatttctccccgtaaaggtccctgccgtagagagtggtttcctgcgccaccagaatcagctcttttacgcctgcttccgccagctgcctggcctccttcaccagctgctcaatgggaacgctgcggtaggggccccttaaataagggatgatacaataggtgcagcgcttgtcacaaccctccgcgattttaagaaaggcataatggccgccggtggtaaccacacgtctgacttccgtctggggaagctcgctcaaatcgtgaaaacaggaaagatgggtacccgttcttcctgccagcacctcatccagcacctttgccacctcctcataggaagtggtcccaaggatggcgtccacctcaggtatctcatccagaatttcctgcttatatctctgggccaggcatcctgccaccagaagggcctttaagttaccctcctccttataccgggccatgtccaggatggtgttgacactttcctccttggcatctccgataaagcagcaggtattgaccagtatcacatccgcctctgtctcgtcgtccgtaaacgtgatgccccgtccgtttaacagtcccagcatcttctctgtatccaccagattcttatcgcatccaagggatacgcaaaataactttatattctccatatgaaaataactcctaatgaacatttaagccatctctgtccaggcagcaccggaaatgacccagaatgcttccctgtacaggagacggcttatgatttatgcgttctgctcttcctcttccgttgtctcttcctccggaaggatttttaccttctggtgatacagttcatcaatggcaatggacagaggtttctttcctgctgctccggcaaccatggggtcctcccccgcaataagctgtctggcgcgtctggaagccgcaatgacgatggaataacggctctgtaccaccggctgttcccctggctcaatatcgctgtttactacgttgattaaatcggtgtatgatggatgtaacatattacattcccctttcaaaattgttatatgatttttataaatggtttactgtctgtcatccaggtggtaaagttcttcccgcatcctgctcaggaagtctaaatgatagcaggtcttactgtgctgcagagtgataagctgatgcatctgctccacacaggcatcaatctcgtcgttaatcagcaggtaatcataggcttccatacccgacgcctcctcagcggcacggcggagcctggcattgatgacctcaatggtctctgttcccctgcctaccagacggcggcgaagctccccggcactgggcggcgtcacgaaaatcagcagcgcatcaggaaaacgcttcttcaccttaagggcgccctgaatctcaatctccagaatcacgtcctttccctctgccatcttcttctccacataatccctgggcgtgccgtagtaatggttcacgtactgagcgtactccaccagacgcccttcctcaatcatctgctgaaaatattccctgttgacgaagaaataatcctccccgtccttttctccttccctgggctgccttgtggtggcggatacggacaatgcataattgtcataccgctttagcagctctttcatgagtgttccctttcctgctccggagaatccggatactaccactaaaattccctgctggttcatggtatgctctccctgacttttcaatgtacttatttggatgttcctattcaatattctgtatctgctccctgaccttttcgatctcggtcttaagggcaatggccttgtccgagatggacaggtccgtggacttggacaggatggtattggcctcccggttcatctcctgggcaatgaaatccagcttgcggccaacgctctctccgcttaaaagctcatttctggtgttgtgtatatggcttctgagacgcaccgtctcctcatccacacagatcttatccgcatagatggtaacttctgccgcaatacggctctcctccatggctgtgttgcttaaaagctcctttaccttgtcctccagccggtttctgtactctgttaaaatctggggggagcgctcttcgataaaatccaccagcgtttccatataatccagtttgcctaaaaggtccttcttaagatgttctccctctatctccctcgactccacaaacttgacagcggcctccttaagggcttctgaaaggatttcccacagatgctcctcgtcgtccggcacctgctccatggtaagcacctcaggaaacttggccagggccgacaccttcacatcattctggatgccaaactcatccgacatcctgttaaagtactccatatattcagcagccagcgcccggttgtacttaaggcacatattgccttctgtgtaatcctcgtagttgatgaacaaatccacttttcccctctggatatatttcttaaggagtgtccggatggaagcttcaaaataattgaacttcttgggcatcttaatacttaaatccagatatctgtgattaacggccttcatctcgacagaaatcttgtactcgtccgtcacattctcgcatctgccgaaaccagtcatgctttttaacataacgaatgcctctctttcgcttttatccatagttagttagtattataattcatctggggaatcaagtcaacaaattgttcaacaaagcaatttccgcttgttcagcaaaacaatttccgccggccaacccaatttccagtgaagcaattaacggggcggttcaaatgcagggccttttctattccgtcaaattatggtattcttatattcagcggccacagcgcccggacatgccccgaagcagggaaccttccggttcatcccctttccctgtccaaacagcatttcccgcgttaatacaggcccgacaggagtgtatatatcatatggcatttgacggcattaccatagcaaacctggttcatgagttcaaggaagcccttgggggcggacgcatatctaaaatcgcccagcccgaaaaggacgagcttctcatagccattaaaaataacagggaaaattaccgcctccagatatcggccagcgcaagcctcccccttatctatctgacggacaaaaacaaacccagtcccatgacagcgcctaatttctgcatgctgctgcgcaagcacatcggcagtgccagaatcgtggacatcagccagcccggcttagagcgcatcatccagttcgagctggagcacttagacgagatgggggacctgtgccgcaaaaaactgattgtggaaatcatgggaaagcacagcaacatcattttctgcaaggaggacggcaccatcatcgacagcatcaagcatgtgtccgctcaggtcagctctgtccgtgaggtgctgccggggcgaacctatttcatcccccagaccgttgccaaggaaaatcctctttcggtcacagaggaaaccttccgccagacagtaggatcctcctccatgtccatacagaaagccctgtacaaccatctcacaggcatcagtcccattatggctgaggaaatatgccacctggcaagcattgattcggattacggcgcctctgaattgtctgaaacagaacttctgcacctttaccacactttttccctggtgatggaggatgtaaaggaagggcgctttgctcctgccattgtctttgatgaagaaggcccggcagaatacgctgccctgcccctgacctgttacgaaggcggcgtttaccgcagccagtccttccggtccatgagccatctgctggaggagtactatgcttcccgggacaccctcaccagaatccgtcaaaagtcttcagaccttcgccggatcgtccagacagccctggagcgcaacaacaaaaaatacgatttacagctaaaacagctgaaagacactgaaaaacgtgaaaaataccgcatatacggcgaactcctgaacacctacggctatgagctcaccggcggcgagaaatcctttacctgccttaactactacaccaatgaggaaatcaccattcccctggacacgcagctgtcagcaaaggacaatgccaaaaagcactttgacaaatacaacaaattaaagcgcacctatgaagccctgacagacctgacaaaggagaccaaggctgaaatcgaccatctggaatccatcagctccgccctggacatagccctggccgaaaacgacctggtgcagattaaggaagagctgatggaatacgggtatatcaaaaagcgccgttccagcgacaaaaagccgaaaatcaccagcaagcccttccactacatttcttccgacggcttccacatttacgtgggaaagaacaactaccagaatgaggaactcaccttcaagctggccacaggaaacgactggtggttccacgcaaaaggcattcccggatcccatgtcatcgtaaaaactgagggccgcgccgaccttcccgaccgcctctttgaagaagccggttccctggccgcctactattccaaaggccgtgacaatgacaaggtggaaatcgactatatccagaaaaagaacattaaaaaggtagccggagccgcacccggattcgtgatttaccataccaattactctttggtggcatcgccggagtgcgggttgaatgaagtggagtgatttggatttatagtgtcgtgaacgagagtacggtacgtctgcggagaggggaggcttgaggctgcaggggttgtgttggatgtaaagcaatacaagccccgcacccccgcctcccctctccgcagactgtgcatctcttccgccaggtatataaatccgaaaaaagcaaaaaaacaactgcctgccataatcacttatgacagccagttgattttccactacattaacacctaatccaaccagtgaattagttgtacttacgcttacgagcagcttcagactttttcttacgtcttacgcttggcttctcgtaatgctctctcttacgaatttcctgctgaatgccagcctttgcacagtttcttttgaatctgcgtaaagcactgtctaagctctcgttatctttaacaattacgtttgacatcgctcacacctaacctccctccagttgtgtaattgtgcataatacaactgtttgggtatttttagcactgctatgattatagcataaaaataccgtacgtcaagaatttttttataattcttacatttatttttaaattttatctgcacatgtactattttgtctgttcttccactgtctcaaccgcttttttaagagcatcgtcgatacctgccggatttttgccgccggcctgggccatgttgggacggccgccgccgccgccgcccacaagaccagctatggctttaatcaggttgcctgcgtgggcgccctttttctgggcggaatctgtggctgtagccataaggtttaccttgccgtcctgctcgcaggccagtacaatgacgccttctcccagcttgtcctttaactggtcgcctaagtttctcatgccgttcatgtccactccggccaccctggctgccagaaccttaagtccgtttacttccttgacctggctcataacatctcccagggagtcattggcaagtttgctcttaagcttctcattctcggagtgaagggtcttaatctcctccagaagggactgtatcttggaagtcagcgcggacggtgttgtcttggctgtcctggccgcctcctgaagctcctcttccacctcctgataatgtttcataagcccctcggatgtaagcgcctcaatacgccttacaccggcggcaataccagcctcggaaataatcttaaaatatgcaatggtgcctgtattcggcacatgggtgccgccgcagagctccgtggagaaatctcccatgcgcaccacgcgcaccttatctccgtatttttcaccgaacagagccatggctcctgttttcttggcttcctccagtgtcataacctgggtgacgaccggaagggatgcctggatttcctggttcaccagttcctccaccttcttaatctcatccggtgtcatggctgaaaaatgggtaaagtcaaaacgcagcctgccagcgtccacgtaggaaccagcctgctccacatggtctcccaataccttgcgcagagccttctgaagcagatgggtggcgctgtggtttttgcaggtaagcgcgcggttgtgggcacatacagacagagtcacgttttctcccacctggaacatgccttttgtcataacgcccacatggcctaccttgccgccctgaaggtgtatggtgtcttcaaccttaaaggcgccgttttcattggagataacacctgtatctccctgctggccgcccatggttccgtagaacggggtctgctccacgatgatggtacccttctgtccgtctgtaagggcctgtaccagctcttcttccgtggtcaggaccgtcaccctggaatcagccgtcagcctgtcataaccaataaattcagtggtaacagaaggatcgatggactggtatacagtcacgtccgcacccatgtaattggtagtcttgcgggcctttctggccttttccttctgttccttcatggcggcggcaaagccgtcttcatccacggtgcagcctctctcttccaaaatttccttggttagatccagagggaatccataagtatcatacagtttgaatgcattggctccggaaagacacttgttcccggttttctgcatttcatcctgcatctcacccaggatgctcagtccctggtcaatggtcttgttgaacttttcctcttcctcagacagtaccttgaatatcatggcctgcttttcttccagctcaggatagccgtccttggacagctcgattacggtctcagaaagaccggccaggaacctgccttcaatccccagctttctcccatgacgggcagcacggcgcagaaggcggcggagcacatagccccttccctcattggaaggcatgattccgtctgaaatcatgaaggtacaggacttaacgtggtctgtgacaatacgcagagacacatctgtctcatggtccttctggtattctgtatgcgcaagctggcacaccctgtccaaaagcgctttgttggtgtcaacggtaaacagggagtcaacgccctgaaccaccacagccagacgctccagccccatgcccgtatcaatattcttatgctccagctctgtataatggccatgtccgtcattatcaaactgggtaaatacattgttccatacctcaatatagcggtcgcagtcgcagcccaccgtacatccgggctttccgcagccaaaggcctcgcctctgtcgtaatatacctctgaacagggaccgcaggggcctgaaccgtgctcccagaaattgtcctccttgccgaacttgaaaatacgctcagccggaatcccgatttccttgttccagatgccgaaggcctcatcatcatccaggtacacgctgggatacagcctgtccgggtccagtcccaccacatcggtcagaaattcccatgtccagtggatggcttctgttttaaaataatccccaaaagagaaattacccagcatctcgaagaaggtgccgtgacgggctgtctttcctatattctcaatgtcgccggtgcggatacacttctggcaggtggtaaccctgttcctgggcggaatctcctgtcctgtgaaatatggcttcaggggagccataccggaattgattaaaagcaggctgttatcattatgcggcaccagtgaaaagcttttcattgccagatggcccttgctctcgaaaaattcaaggaacatccggcgcagctcgttcacgccgcggtactgtggttctttcactttattttcctccatatcattgctctaattacataaccgtcattttaccataacgctatataattatcaagaccgtcttaacaaaaaagagagggaaaaccaatgattttccattgtttttccctctttcccgcaattcttgattccggtcatacggaccgttctttccatattttctcctgttacggcgatgccggttgagaagaatcctcctcttcatagaacaccccgttggcttcctcatagcgtcctgccagttcataagccctgtccctggtcagactggccaatgtggccgcatagctgattccctccatagatccgctgttcctgcctgaactctccgccgccctggcatcccggttcttaagccattcctgctgctcagaagccagctttgcagcgtcctcctgggacagcatctccataagcgcattgtaaatggaattcagttcaccttcccacagcttaagttctgtttccgccgaggtcttgatggaatatacattggagtccgtttcctcctcccgcatcttaagaatctgggtatccaaatcttccaggcgtttgcggtagtctactatgagactcaccttatattccctggtcctggatcctgtgagaggggaaataggcatattctcttccgaagcagcggccccctcaccggcgccacccgcagtatccgaagccattgtttccccagcggcatccgccattgcaggagctgcctggccggacgaaaagggctctgctgctgcctttgctgcaggagcctttgcgtatgctgcatctccggaatctgcacctttcggagctgcgcttgcaaggcctgcatctcctgatgccgtgtttcccgaagctgtattccccggccctgcatctcccgtcatcctgcgttccgcaggtgttgcgggtgctgccctgcctgctgccgccatacctgtatccgttccgcctgcctctgtatcctgctgtcccaaagccggggcaaaggaaggcgctgccgccgtgtcttctgcccctgctgtaatctcagccatcatggccgccccctggctgttcacatagtatttggtatagtgggtaacaccagttcctatgaacaggatacagccaatcacaatccatatccgtttatctttcatcgcaacacatccctgccataatcttgtatttaccttatcacaaaaaaggaagaaaagaaacacgaagataaaaggagtaatagattgtaagagatatgtaagaaaatcaggaacagatacaaatgcaaaaaaagcgctgcatccccttttttcatgtaatccagggttaagcagcgccttctgcttttaaactgcatcagggtaaagcttatttatgcctccagcccctgatctgtcatcagattcccaccatctgccgcagaggtggccagagcatcgcatttctcattttcaggatggcctgcatgtccttttacccagatgaatttcacctggtggggttcctttgcctttaacaggcgtttccagaggtcgatattctttaccggcccgcttttcccgcggttccatccctttgccacccagctgtcaatccaatgctggttaaatgcgtctgtcaggtatttggaatccgaatataattccacctggcatggcctgtttaatgcctccagccctacaatagcagccatcagttccatccggttgttagtggtgcgtacatacccgccggacatggtcttctcatgaagctggccgctgctgtccgtaaaatgaagcactgtcccgtaaccgcccggaccgtcaggatttcccctggcagaaccgtctgtgtaaatctgtaccttcgtcatgtgtcaatatctcctgtcagtaacattctatctgtcccatttatcgcacagggcaagaatctgttccgtaaaacgggtcaggtccttattagcgccgccctcgttgcggtgaatcacatccaacagcatcttgccagcatccaccagcctggtataaacaccgctggccctgcgtttggcggcagtttccttctcaatgagaacgccctctgtctctttaatccagaagccctttataaggtcaaactgggaacctgaaaaaggcgccctggctgtgagtttcagctgggtattcagcacatccgagaaggatacgcaggattcctcgcttccgtgaaccacaaaaacataatccggctttttctcaaacgcggatatccagctgataagcccgtccctgtccgcatggccgctgattccatccatggtttctatatgagcccgcacatcaatttcctcaccgaatatcttcacggtctgagccccgtcctgcagaatccgtcccagggttccctcggcctggtatcccgcgaacacaacggagcactccggcctccacaggttatgtttcagatggtggcgtatacggcccgcatcacacatgcctgccgctgatatgatgaccttgggcgtcatgtcaaagtttatgttcttggattcctcactggtaatggagagcttcagtcccggaaaatcaatggggttgattccgcgttccaccagggcttttgtctcctcgtcatagcactccagcatattgtccttaaacacatgggtggcttccacggccagagggctgtctacatagacctcgaagctgtcatggccggccacaagcctttcttccttaatatggcgtatcagatacaataactcctgggtacgtcccactgcaaaggccggtatgaccacgttgccctgccggtccagagtctcctgtatgattctggccagactgtccacatggtttacatcctttttatgatagcggtttccgtaggtggattccataacaacataatccgcctccgtaatatactggggatcacggatcagaggcttattcttattcccaatgtcgccggaaaatacaatttttttcttgctggcgccctcagtggcccatatctcaatggaggcagaacccagcaaatgtcccacatccgtaaaacgcagggtcagattgtcattgagcttaaatacctgcccgtaagccacaccttcaaaatgcttaagcacatcctcagcatcctgcatggtatagagggcttccacctcgccccggcctgcacgtcgcgctttccggtttttccactcagcttccatctcctgtatgtgggcgctgtccttaagcatgatgctgcacaggtcggcggttgcataggtggtgataacctggcctctgaatcccctggcatgaatccacggaagcatgcctgcatggtcaatatgcgcgtgcgtcagaagcacatagtcaatttcatgataccccacgggcagctccgcattctggtatatgttatttccctgttccataccgcagtctataagcaccttggtatttcccacctccagaaaatgacagctgcccgttacctcatggtcggccccgataaatgtaagtctcatctgcattctcccctctgagtataatatagtcttgccccacagaatattctgtcaattatggctacagtatatcatattccccataagaatgcaaatcgtattgcaatatttgcacaattttctgagaatcgtccttctcccaacacgcattctattattgctgattttaaataataatgcatatcataccgccattgctgtcattgataattttctgcagagtatcctgcagcttcagctggcaatcctccgtcatctgggacaccttggcctggataccgtcctccacaatctgttcaatggattttccgaaaatattggtattccagattccgtcgtcgctctccctggcattttccttgatataggcaatcagatcctgggcctgctgctcgcttcccacaatcggagcgatctctgtctcgatatgggccttaatcaggttgatggacggtgcttccgctttcatcttcaccccatacttgttgccgtgtttgatgacctgcggttcatccagcacgatttccgagcgttccggtgtcaccactccatatccctttaaccgcacctgggtcagagcgttctgcactttttcatattccttctgcatattagccaggctgctcagggtctgcatgagctggtactccccttcaatgggcagtcccacatagtcgctgagaatctggtaatagtagctgtcatccatatccacctggacacccaccctgccgtccgccatctgcatatttttgacattcatggatcgtatggtatccgtatgctgctgttccagttccccggacacatccttcatgtgtgttactttctggattacattcctggccgcctggatcacctgggccttaagccaatgggtggaaggcaggatctccagccatttgggaatatggaaatccatctcagtcaccggaaactccttcaggacgcgctccaggatatggaaaacatcctccttcttgagctgctcgcagtttacaggcagcaccgataccccatatgattcagacatttcccttgccagcctggcagtttcgtcggaataaggtttggtggaatttaaaagtaccacaaatggtttgcccagctttttcagctcgtcaatggtctgcttttcagctgctatgtatccggggcgtttaatttccccaatggtgccgtctgtggtcacaacgattccaatggtggaatgatcattgataacttttctggttccgatttccgcagcctgggtaaacggaatgtcataatcaaaccacggcgtcttcaccagtcgctcctcaccgttttccacatgccccgctgccccgtctaccatgaatcccacgcagtctatgacccttaccttggcttcaataccgtctgccagattaatgctggccgcttctttaggaataaacttgggctccgtggtcatgatggtcttgccggccgcgctttgaggcagctcatcccggctcaggttgcgcaggttctcatcctccattgcagggagcaccagcagctccatgaaccgctttatgaaggtagatttgcctgtgcggaccggccctactacgcctatgtaaatctctccgcctgttctcgcctgaatatccttgtatacattaaaattgtccataaatatacccccttgctatgcttttatagtatatgcaggggggtatgagtatatgactggtacaaaatcaccatgtatcaggtctattcacgcaaaatcaacagataaaatcaggccgtcatcgccgtacattatatatagcatatcttaccaggggtgtcaaggaacgaagcaggggttatccgcccctgctcctttctcatatccatgattcatttttacataattcttcctgccagtggactattattacctttattcgctgagataagccttttttacctgatcattgttcataagctcctttgcgtctccgctgagagcaacattgcccgtctccagtacataggccttatgcgcaatggaaagagccttctttgcgttctgttccacaagaagcacggtagtcccatccccgtttatcttctggatgatatcaaaaatctcatttacatagattggtgaaagtcccatggagggctcatccataacaatcatcctggggtggctcataagagcccttcccatggcaagcatctgctgctcgccgccggacagggtgcctgcaagctggttcttgcgctcctccagacgcgggaaacgctggtatatcatcttcagagtggcttctatctcttccttgtcttttcttgtataagcccccattttcagattctgcagcaccgtaagggtggcgaacacccgccttccttccggcacatgggcgattcccatgcccaccagtttatagccgggaaccctggttatatcggttccctcatatacgatttttcctgtcttcgcgctgataagcccggtgatggtgtgcagggttgtggtctttcccgcaccgttggcacctatcagagccacgatttctccctggttcacatcaaaggagattccttttatggcctggattacaccgtagtatacttccaggtccctgacttcaagcatagccatattatacgctcctcctattcaccaagatatgctttgacaacttccggattgtgaagcactgcgccggtctcgccctggcacaggacctgtccgaagttgagaacggtcagttcttcgcagataccgcttacaagcttcatatcatgttcaatcagaaggatggtcatatcgaaattatccctcacaaaacggatggtatccataagctcggctgtctcatttggattcattcccgctgccggctcatccaggagaaggagctttggctccgtggccagggccctggctatctccagctttctctgctttccgtaggggaggttggaggctttgtagtcgcactcttcgtccagtccgaataccttgagcagctccatggccctctcgtccatttgcttctccaccttaaaatagttgggaaaacggaaaattccggctgtggtggaatacctgtaatgattgtgaagacctgccttcacattgtccagcaccgacaaatccttaaacagacggatgttctggaaggtcctggcaatgccggcctggtttatttccgtggttttcctgccggtaatgttgactcctgccagctcaatgcttcctgcatccggcttatatacgcctgtcagcagattgaaaatagtggtcttaccggctccgttgggaccgatgagaccgtaaagctgtcccttttctatgctgatttgaaaattatcaactgccttaaggccgccaaaagatatgcttaaattcttaacttcaagtaatgccatcttatgctgcctcctttgcgggtttcttatcttttctgctgaatttttccgccaaacgttcacgcatcaccacaaactggggtgcggagttgaacagcatggccagaatcagcacgattgcgtacataagcatacggtaattgctgagtccgcgcagcatctccggaaggagatacagaatgaccgtcgcaatgacggaaccgcggatgtttccgataccgcccagtaccacgtacaccagaatcatgatggacatgttgtatccgaaattcttgggcagggctgtcagggtggtcagattgtgggcatacagcacaccggcaatacctgcaagtccagcggaaatggaaaatgccagcagcttgtacttggtgatattgatgccgatggactccgctgcaatgcggttgtcccggatagccatgatggcacggcctgtgcgggagttcaccagattcatgacaatgaacagggtgataagcaccaggataacacctatggtaaaggtggctgcctggggcgttcccgtaatgccctgggcgccctttatcaggatttccccgccctctcccagctttaaggacatggaatccttaaaggagatatggaagccggaagcgtcccgtcccagataaacagcattgaccaggttcttgataatttcaccaaaggccagggtcacaatagccagataatcacctctcaggcgcagcaccgggattccgataatgacgccgaacagggccgctgtaacggctccgatgaggatggcgatgaccattccaagagtcgggtcaatggctcccttcatgcactttgaaaacagggcgccggcaaaggctcccacgcacataaagcctgcgtgtcccagactcagctctcccaggatacccacggtcaggttcagggacacagccatgattacgtagatgcagaaaggaacaagaagtcccttcataaggctggatatatgccctgttcccaccaggacctgcatgatgatataggcagccaccaccatgccgtatgtaatcatattatttatgaatgtctttcgttttgcgttgctcttcataccggcacctacactttctcattaatcttcttgcccagaataccggtaggcttcaccagaagcacgataatcaggacggaaaacacaatggcatctgacatctgtgaggatatgtatgccttggacagaatctcaatgacacccagcaggataccgccgatgaaagcacccggaatggatccgattcctccgaatacagccgcaacaaaggccttgatacccggcatggaaccagtataaggtgtaagggacgggtaagcggagcagagcagcacgcccgctatggccgccagcgcggaaccgatggcaaatgtaagggcaatggtgccgtttacattgattcccataagggtagccgcccccctgtcctcggaaaccgccagcatggcctgtccggccttggacttgttgataaaggcagtgagtccaatcatgatgacgatacaggaaaggatggtgacgatggtctcccctgtaatggtcatctctcctcccgccagtttgatggcaggcagggtcaccacggaggtgaaggatttggtatctgctccaaagataagaagggcaacgttctgcagcaggtagctgacgccgattgccgtaatgagaaccgcaaggggagaggcgccgcgcaggggcttataagcaatccgttcaatggtcatgcccaacagcgtacatacggccaccgcaaggagcactcccgccatgggcggcagtcccattgtgctgaccgtgacaaataccacgtagctgcctatcataataacatcgccatgagcgaaattcagcatcttggcaatgccgtaaaccattgtatatccaagtgcgatgatggcatatacactgcccaggctgatgccgttaattaaatagttaataaagcccatacctacacctcttcgtctgaagtcttttttagtttatcgctataaagcgacagattattcaaaattatatcatatatcgttactataaacaagagggttgtcatagtgacaaccctctgttgggttttctggttggttctggccggatttaaaaggcggcagattacattgcagagtaagctccgtccactaccttaacagccttaggcgccttgtgaggctcgccgtcctcagtccaggtcatgccctcgccggtcaggccgtctaatttgatattcagcatggatgcctttaacgcgtcacaaatcgtgctggcgtctgcatcaggagttacattggcgtcctcaatagcagccttgatagcgtagattgcatcgtatgcatctgctgcaaactgtaccggaacctcgttgtaagcagccttgtagctctcaacaaacttaacggtcaggtcatcggtagcatctgccgcgaatggtgtcaggagcataagtccctctgccagcttggtgtcaaagttctgaacctgaaggataccgtccatgccgtcgcatccgaagaactgcggtgcaaagcccatggtgctggcctgctgaaggatcagggaagcctcggtatagtaaattggcaggaacaccagctcagcgcctgcatccttggccttctgtaactgggtggagaaatccttgttgctgtcagcggtaaatgcctcggctgcaacaatctcaataccctggtttgcggactcttccgcgaacttctcatagataccgctggaatatacgtcggagctgtcatagataacagcaaccttggaagccagcttgttctcgcctatgtacttagcggatgcagcgccctggtccggatcggagaagcagatacggaatacgttggggttagccgcacactctacagcggaaccggatggtgtaatctggaacatgttgtcagctgctgtcttatctgcaactgcgatacatggagcggaggtaaccgtgcccatcagcacctgcataccccagtcctttaatgtattataagcattgacagacttctctgcgtcatgctcgtcgtcctggaagttgaattcaatctgtgcgccgtttattcctccggcctcattgatttcctttactgccagctctgcgccgtgctgtacagccacgccgtacacagccgcaccgccggttacaggaccgatgccgccaatcttgaacacgccgcctgccgcacctgcgtcagttgctgcggtatccgctgcctcgcttccctctgcttttgcatctgccgcagtagtctctgctgcttttgtggtctctgccgtattggaaccgccgcatgctgtcaatgacatagccataacggctgccaggcccagacttaaaaatctcttcttcataattagttcctcctcttgcctttaaaatataaagctttctatattataggtagtccgaatgggtttgtcaatcgtttcatgaaaattatggtttattttcgacgatataccgaaaaattagagccaaagcaggtataatccgccaaaaacaggctattttttaggggaaggcaccatttctggttcccttcccctattttttattcttccgaccactccaaatccgagttttcgatacgcttatccctgagcatcagctccagaaccgcttcctttgcaggcatgcctccgaacaggatggcattgacctgttccacaatcggcatggacaccttgtactgctgcgacagcgccagagccgccttggcggaatacacaccctccaccaccatctttacctctgccatggcttcctccatggtatagccccggccaatcaggatgcctgccctgcggttgcggctgtgcatgctggcacaggtcacaattaaatcccctatgcctgtaagtccggcaaatgtctccatccgtccgcccatgtcaatgcccaggcgggatatctccgcgattcccctggtaatgagggcagccttggtgttgtcgccgtatcccagaccgtcggccataccggcggccagggcaatcacatttttaagggcgcctcccagctcaattcccagcacatcagggctggtatacacgcggaatacctcgctcatgaagattccctggacaaattcagccacgctgcgcttatgggcgccggccacacatgtggtggggaggcccctgctcacttcctccgcatggctgggccctgaaaggaccgtcacctcagcctccggcagctcctcctcaataatctgggacagggtcatgaggctcttctcctcgattccctttgccacgtttgttatcacctggccctgctttatgtagggcttcatcctttgtgatgtctgcctcacaaaaaccgagggaacagccagtaccagaaggtccttatccctcatagcctcctcaaggtcatccgtaagcccgattgcttccgggatctttacctcaggaagattgcggtggatacgtgtctcctttagttccgctatctcctgcggaatggcggaccatatctgtaccgtatgtccattgccgttaagtaaaactgacagggctgtgccccatgtgcctgatccgattacaccgattgatgccataacctcaccgtccattaattgttttttactgtcctttgtatactactctgtctttttcttagcgcctaccttgttctccctgccctgtaccagtctgacgatattcgccctgtgcctccagaaagccatggccgctataaccgcagaaacagcgtagaactggggtctggcctcgggtgccagcccgtaagcccccaaatggccgaaatagatgttccagcacaggaaaatagcggacaccaccagggagcccagggacacatacctggtcaccgccacgataagaacaaaggccagcaggcagacagctgtcagccgccagtccagcgaaaacatgatgcctgctgttgccgcaatccccttaccgcctttaaacttaagataaaaaggaaaattatggcccagtatgacgccgaagcccgcacagagtatcagcacatagatataccccggctgggaccggaaaagaatccttaccaggaagcagggtatcaccgttttcaggaaatcacccatgaatacaatgagacctgcctttactcccataacgcgcagggcattggtgcttcccgaattgccgctgccgtgctggcgtatatcaattcccttggacctgccgtaaatgaaaccggtctggaataaaccaaagacatatcccatggccaaacatataatctgttccactccttaatccccctttccttacacctactgctcttttccttttcgttccctgacaaggaattttagggatgtccctttaaagccgaaggcatttctgatctggttctccagatacctggtataagaaaaatgcatcagttccttgtcgtttacaaagatcacaaaggttggaggctttaccgccacctgggtcatatagtaaatcttaagccgttttcccttgtcggaaggcggctgctgcatggccactgcctctgtcatgatttcgttgagaacgccggtggccaccctcaggttctggttctggcgcaccacgtcaatcatctcaaaaagcttggtcagacgctgtcctgttgccgcggatataaagagatattccgcgtatgggatgaaggacaggacctccttgatttttctggtatattcgtatatggtcttgtccgttttctcgatggcatcccatttatttacggctacaatgattcccttgcctctctcatgggcgattccggcaatcttggcatcctgctccgtgacgccttccgtggcgtctatgaccacaaccaccacatcggcccgttccacggcggacacggtacggataatgctgtagcgctccagttcttcctttatcttgctcttgcggcgcaggccggccgtatctatgaatacataaggggttccttcatggataacctccgtatccaccgcatccctggtagtgcctgctatatccgacacaatgacgcggttctcgcccacaagcttattaataatggaagactttcccacattcggcttgcctaccacagcgattctcggacgctcgtcctcttcttcctccatctgctccgagtcaaagtgcttcaccacttcgtccagcagatcaccaattcccagccgcgaagcagccgatacagcgacaggctctccgattcccagattgtaaaactcgtagacgtcattgccgtacttggcaacgctgtccaccttgttcacagccagcaccaccggcttgtgggatttgcgcagcaaatcagccacctttgaatccgaatccaccagtccctgacgcacatccacgataaaaataatcacatccgcagtagaaatggcaatctccgcctgctcccgcatctgggaaaggatgatatccttggaatccggctcgatacctccggtgtcaatcagcgtgaaattcatattcagccagtcgcagtccgcgtaaatccggtccctggtcacgcccggcgtgtcctttacaatggaaatggtatctcctgctatgacattaaacaacgtagactttcccacattgggcctgcctacgattgcaactattggtttactcatgtttttataacctcctcattcatgaccttccgtcacatctgcctgcgcacaatccggtattcatcatcggactggtaataaggacatgcgctaacagtacctcttaaaaagcgccccatctcatcctcgtccagattcacttcacagatatagtaatcattttcctcatcatatacgtaattgccgcagcactcacagctggtctttttgttctttccaggtttcatctgaatccatatcctttaacacaaattcttcgcatccgcttgattttactataccggacctgacttgtaaagcactttcttattaacctctatcatagcaatataacttatttttgtaaatgcaaagttaattttctaaaaaatgtttgtggaaatgtcttgttttttttgacgaaatagtatcaaccccttgacccggtcaaagggaaatggtataaatcatatgtgatattcccaaacaaatgatgattccaaaggagcaaagctatcatggctaacaattttgtattcaaagattcccttcccgtagcgcctttaaaaatcgctgcactggaaagctgtaaggatcttgcagccaaggtgaacgaccatattgtacaattcaggcgcaatgatatagaggaactgatgcgccgcaaggaggaccttcactaccgcgggtacgacgtggattcctatctgcttcactgcagctgtcccagattcggaacaggcgagggcaaagctgtcatcaatgaatccgtaaggggcacagatgtttttgtcatggtggatgtgatgaattacagcattccctacacggtaagcggttataccaaccacatgtcgccggacgaccattttcaggatttgaagcggattatcggggcctgctccgcaaccgcccacagggtcaatgtggtcatgcccttcctatatgaaagccgccagcacaagcgcaacaaacgcgaatctctggactgcgccatggctttagaggaactggcagccttaggcatggaaaacatcatcacctttgacgcccacgatccccgggtacaaaacgccattccgctgattggctttgacaatttcatgcccacgtatcagtttgtaaaggccctcttttcccatgattccaacatccgcattgacaaggaacacttaatggtggtcagtccggacgagggagccatgaaccgcgccgtataccttgccaacaacctgggtgtggatatgggtatgttctataaacgcagggattattcccaggtaattggcggccgcaatccaattgtggcgcatgaattcctgggctcttccgtagaaggcaaaaccgtacttattattgacgacatgatttcctccggcgaaagcatgctggacacctgtaaggagttaaaggaacacaaggctgacaaggtcatcgtctgctgcaccttcggtctctttaccaacggccttgagaaatttgacgagtactaccatcagggatatctggattatgtcatcaccaccaacctgaattaccgtacccaggaactgcttaacagggaatggtatctggaagccgacatgagcaaatacctggccgctgtcatcaactccctgaaccatgaccgctccatcagcgcttccctctctcccacggagaagattcagaagctggtccagaagcatcagaacggcggatacgagtatttccagaagcttgtataaccccctgccaccatgcagaaaatttaacccggcaatcaatattcaaaaatgcacagtccacggcagcgaaatgcccgccgtaagggactgtgcattttttatgtttctctctatggtcacaccaggttccaggcagccgggtccgcgcccttcttttccaaaataggatccgtcccctgttcctttaccagttcatactcttcgccggtaagcagcatcatccacagcaggttcacgggctcgtccatgaacatgggataggcagggccttcctgtacgccgcacaggccagggctcagaagcagaacaccttcatagccttccactccgctgcagggaatggtatggccgtgtcccagccagcccagttccttccatggcagggacgcctgggccgctgtatagttaagcatggccataatgccttcctggctgcatcccttgggaaaagccactcccagttccatgcggcggtatttccatgtctcatcctgaaaatactgttccacctttggctgggccagggccccgtttccaagggtaaacgcatactggctgccctttcgttctcctgtcaccagagcctttggcggaaatccgcctccgtcaatggcataatactttttgtggggaccaaaaaatgcttccatggcagccagctgttcctgctgcatggtctcaaaatatcctcccctcataatgtcccagtacatccggctgcgctccatccgctgttccagaacaggcagcgcctcctgaagctcccaggcaaagggcgccataccctttgcgtatagggaatatcccggaaattcccggtcggcccagccaggaataaccgcaatcatcctgccgtcctcatacagggctgcaccgtctccctcttcaaaccagaccagggacaatttttccctgtccaggcagatacccgcagaatcatgggtcacgtatgccctgggcatacgcggggccattcccatcttcatggcctcataatccatatcttccatggccggaacccggttgcagatccagcagttgcgaatctctgcgttctcgcttccgggattcacccaaaggtagaaatagaccgcctgtccgttgtcctccacaacagcctgtatgctgcatacaggagaccactcctccaataatacatccatattgcccctcttcctttctccttcgcagacctcacgctacttaaggcacagaaacgctgccaggtttccccgctcctcccccactttccggtgtgaaaagagataatcgctgttgcacatggtgcagatgttagtgatatggatattctcccggcgtatgcctgcctcgcggaaaatgatttcattggccttccacaaatccagctgatactttccgggcctttttccttggcaatacagcgcttcccggtgttccggcccaaaggcctccctaaattcctccaccacttcaccgcccacttcaaagcagtcccggcagatgctgggacccacacaggcaatcagatcctccggctttgtgccgaaggcttccttcatggcatccaccgtcacctggcccatgcgcttaaccgttcccctccatccggaatggctgagcccaatggccctgtttaccggatccaacaggtacaggggcacacagtccgcataaaaggtcaccagggtaagccccggcacatcggtaatcagaccgtcgatgtccctgtaatcccgttcccttacaacaccctttcccgcatcctccagcgtcacccggcgcaggttgaccgtatgggtctggtgggacaccaccatgcggtcccgctccactcccagggcggctgccatacgcgtaaagttttccagcacatcctccgctgcgtctcctctgctgtaagagaaattcatggtggaaaattttcccctgctggctccgcccatgcgggtggaaaaaccattgacggccagcccagtatcatccagcgccttaaatgagaggtagggaacgcctgcactttcttttgtatcaaatacgcgggatttgttcttatagctccagtttatatccataacaccattgcctccttatactcaaaatgcatcctgtatcagctcaatgtcactgcccaggattcccaccacgtcaaaccggcagggcacgtccccgcccattccatggctgtacagataaaaggccgctgcccgccgtatgcgctcctgcttccttgcgtcaacagcctccgccgggcttcccatggacagcccggagcggtattttacctctgcaaaaacaaggtacctgccatggcggcaaatcaaatcaatttctccctggcggcaccggaaattccgctccagcacgcggtaacccttacttgttaaaaaggcagccgctgtttcctcataacggctgcctgtctgtctcttattcatatgtatccgcctgaacaatattcctgataaagcttctcctgtgaatagggcagggcccaagctctctgatggcagcaatgtgggccgccgtgccgtatcccttgtgtttggcaaatccatatccgggaaataattcctcgtactcagccatcatatggtccctggtgacctttgccaggatgctggctgccgctatggacaggctctttgcgtcccctttaataataggcacctgcaccccctccagcccgggaatggtgacagcgtcgttgagaagcacttccggcttcacggaaagccccttcacagcctccctcatggcctcataggtggcctgaagaatattgatttcgtcaatccgggcaggagatgccaggcccacattccatgctacagccttttcctttatctctaaaaacagttcctcacggcgtttctccgacagtttcttggaatcattgagatacaggatacggcatcccttgggaagcactacggctcctgctgccaccggtcccgccaggggtcccctgcccgcttcatcaataccgcagatataggtgcaggcatcatactccttctcatattccgccatggcctccagacgggccatctcctgctccagcttttctccctttagtacccttgcagccattgtcattccaccttgtccttttgattctccggctcctccagcgtgatccgccccaacttgcctgccctgaaatcatccagaagcaggcctgccgccctggacacatccagatccccgccttttaacaggcaggccctgaccctggctatttcctccaggataacggcagcttcctttccctctgtttccaggccaaaccgttctgccagcacctggggataacgctttttcaaaaagcgtataagctcgcaggccagctcatctttgttgagaatctggtcattgatggagccgatgagagccagcttcaggcccacctgctgatcctcaaacctgggccacaggattccgggggtgtccagaagctccagcgtcttattcaggcgtatccactggtttcccttggtgacgccgggcttgttgccggtcttggcgcaggcctttcctgcaaaggaattgatgaaggtggacttgcccacattgggaatccccaccaccatggtacgtatgggacggttcagaatgcccctgcgccggtccctttctatcttttccttacatgcctcctggatgacggactgcacctgcttaagtgttcccttgttcctggcgtcaaccttcaccacgtgaatgcccttgtcctcaaaccaggctgcccagcgggcattctgccgctcgtccgccaggtccgatttgttgagaagcaccatcctggccttgcccgcgcccaggtcatctatgtccggattccggctggaaaggggaaccctggcgtctaccagctcgattaccaggtcaataagcttcatatcttccttcatggcccgttttgccttggtcatatgaccaggataccactgaatgttcatatttgtaaactcctgttctatcttgaatggatgaagtccagtttcagaaggggaaatatcctgaaccagaccttgccctgtatctgctctctttttacatttccaatgttggggaaccggctgtcctcactgctgtccctgttatctcccaggagaaaatactcattgtcctccagcttaatgggagtgtccgcccttcctgccagggacacctgttccaggccgtcctccgcgtttaaaagctcgccgtcaatgaatatatagccgcccttaatctgcacggtctcaccaggcagaccgatgatccgcttcacattcttcttgtggtcctcgcgctcaaataccacgatgtcaaaccgttctggctttcccacatcataaatcaggcggttcaccaggaccacatcgtccgcatctaaaaccggctgcatggaaccgcctgacacaggcacctgagtacagaaaccgtagaccaggaaccaggcactggccaggaccaacaccacattgaccgtccagcggactgcttttctcagccacgccgtatcctcattcacataaaaatccatgtacccacacctatcttttaaggcatttcccggactgcttacgggtatgccgcctgcttaacaaaatagagtttgcatctgcaaactctattctcacttccactacctgattatttaactaattctttaaccttggcagccttaccaaccctgtctcttaagtagttcagcttcgctcttcttactttacccttacgtacaacctctacgttgtcaacgcttggggaatgtaatggccaggtcttctcaacgccgataccattggagttcttccttacggtaaaggtctctctggctccgccgttctgtctcttaatgacagttccctcgaaaatctggattctctcgcggttaccctctttaatcttgttgtataccttaacggtatcgccaacgttaaagctgggtacgctttccttcaactgggctgcttcaatgttcttaataatatcgttcatcgtgtgaacctccttcatctattggatgttcttaatacgccggcagtaaatcagattcaccactcacagtaacagaggaccatctatttcttgtcacaacgacttattctagcatatattgtcccaaaatgcaagcattttatgagctgtttcgccttgatttcgccttggttctattcctcttctttttctccgggaaggatgtacagatgaaccttgtcaatacggttcttttccacctgttccactaccaggcgcacattgccgcacaccacctcttcgccctgggaaggcagatgttccaggcggtcaatcacaagcccccccacagaatcatagtcctcagaagacagttccaaatccaggatgtcattgaggtcatccagcttcatggaaccttccaccagatactggccgtctcccagatccatcagctcctcttcctcatcctcgtcatactcatcgcgtatatcgcccacgatttcttccaggatatcctccagggtaatcagacctgccgtggcgccgtactcatccagaacaatgatgatattgttgggagacttcttaatctccatcatcagctcggatagctttttagattcaaaggtataaaaaggctggcgcaggtaatccgacacgcagaaggacgccttgtcctccaccagcagcaggtccttaatattgatgatgcccaccacattgtccgttgtttccttatagaccggaagcctggtataatgctcctctctgaatatctgaatcagatcatcataatcagcctctatgtcaacaaacaccatgtcgattctgggcaccatgacatcctttgccacggagtctcccaggtcaaacacattgttgatcatctcacgttcttccgactcaataacacccttttcatggcccacgtccacaatggtcctgagctcgtcctccgtaatgtcgtcattcctcttatcagggtccacatggagaaccttgaggacaatcagcgacatccagttaataaggacaatcagaggggtcagcacagtcatcagaatatgaatcatatggcctacccgcagggaataccgctccgcatccagggttgccattgttttaggtgttatctcaccaaaaatcaaaattaaaagcgtcagtacgccggtcgcggctccagcggctttatttccaaatatttccgtcaccagcacggtaagcatggatgaggccgaaagattcaccacattgttgccgattaatatggcactgagcatctttccctgattctcagacagcttcatcacccactgcgcagacttgctccccccttctgccaatgtcctgatacggattttattgacggttgtgagggcagtctccgaagacgagaaaaaagcggaaagtcccagtaaaatgataatgataacgacacgtatggcaatactgtcacccgatgggtccaaaaaaatcaactcctattatttcatattttacagtcccaaaagcccggaacgtatgggccgtggcctgtaatgtgtgtatttatgtggatagtttcagagaattgtacaatattattgggggattgtcaatatggaaggattcgcggggtgggggcaggggagagaaaaaaagggggtatcgaggaaaagcagcgggaggggattgacattgttaggctgcccgtatcttaagcctgcggctctcatctgcgcgaagcggggaaaatatgcggctggtggggagatacgttgtggagtgagaggaacgggggcggaaacacctccccctccgcccatcatccccccgcaagcatccccatcactttaaagtacccttgcagctccccaaccgtacaagtcttctcagccagcaatttctttgccgcagccattgcctttcgtttggtgcggccggcagaggcctcatcgttcagggattttacatactggtctataagctcctccaggatttccaggtcgcctttttcccggcggagggaatccaggtattttacctccttcatggtcagggcggcatgttccagcaggtccgggcggcgctccagagtgcgttttatggattgctgcctgcgccactcctcaatatttttatggtggccgcttaaaagcacctccgggacttccatcccgcggaatacctcgggacgggtgtattgggggtattctaacaggctgtcatggaaggattcttcctcagccgaggcgtcgttgttcagaaccccgggcaccagacgggagatacagtcaatcataaccatggcgggaagttccccgcctgtgaggacataatctcccacggaaagataatccgtggcaatcagctccagggcacgctcgtcgattccttcgtaatgcccgcagagaaagaccagatcctcctcctttgccagctcctccgctatggtttggttaaataccctgccctggggcgtcatatagataagcctgggcttcctgccgatgcgcccgcacagggcctcgtaagcctcgcacacaggccccggctgcataaccatgcctgcgccgccgccgtaaggggcgtcgtccacatgtctgtgcttatcctttgaataatccctgatgtcaatggcttccacagatatggtcttgctctccatggcccgccccgttatgctggttcccagtcctcccataaccatgtcggggaacagtgtcagtatgtgaaaattcatccggtctccttccagcggttcttaagctttgtctgaaggcggtacagggtgttcatagcatcaagaggcgtcatggtggacagctccagactgtccagctcacgtatgatatcgtcatcctttaccgtatcaaagaaggacagctgctgcaggtccacctcatccggcttcggcaccgccttgtgctgggttatgttggaactgatttccgcaatttcctttgccctggccgtgatgtccgcatcgcttaattcttccgcgatttcttttgccctggctataacggaatccggcacgccggccagctttgcaacctggatgccgtagctcttatctgcaccgcctcggacaatcttgcgcaggaatacgatgtcgtctccctgctcctttaccgctatacaataatttttcacccctgctatggtgccttccagctctgtcagttcatggtaatgggtggcaaacagtgtcttggctcccaatagcttggaattgcttatgtgttctattacagcccaggcaatggacaatccgtcaaaggtgctggttccccttccgatttcatccagtaccagaagactgtttctggtggcattgcgcaggatgttggccacctctgtcatttccaccatgaaagtgctctgtccactggccagatcgtcggaagcccccaccctggtgaaaatacggtcgcatatgccgatatcagcctcctgggccggcacaaaactgcccagctgggccataagtacaatcagggccacctggcgcatgtacgtggatttacccgccatgttggggcctgtgataacggacagccggttctttccattgtccagaaaggtgtcgttggccacaaacatgtcgtcccgcatcatctgctccaccacgggatggcggccgttcttaatctgaatcacgcccttgtcgttgatggagggcttcacatagttgcgccgggttgccaccacggacagggaacagaatacgtcgattccagctatggacttggccgtcttttgaatgcggatgacctctgccccgattttgtccctgacctcgcagaacaggtcatactccagggacaccagcttttcctccgcgcccatgatgatgtcttccagctgctttaattcatcggtggtaaaccgctccgcgttggtcagggtctgcttgcggatatagtaatccggcacctggtccttgaaggagttggtcacctcaaaatagtaaccgaataccttgttgaatttcaccttcagggtcttaatgcctgtcttttctttttcctttgcctccagctccgccagccagttcttaccctctgtcttggcatggcgcagcttgtccgcctcctggttgtagccgtcctttatgatgccgccttccctgaccgtaatgggcggctcctccacaatggcatcccctataagctggaagatatcctgaaggggatccagctcccggcccagctctgccagaagttcgctgttaaactctcccagtatccgtttgatatagggaagcatttccagagagcttctgaaggcaatcaggtcccttggattggctgtcttatagctgattcgccctatcagacgctccaggtcatagatgggatttaagtactcgcatatctcttcccgggagatatagttcatgttcagctcttccaccgcgttctggcgcttgatgatttcgtctctgtgaatcagcggctgttcgatgcaggcgcgaagcagcctggctcccatggctgtctttgtcttgtccagaacccacagcagggtgcctctcttctgtttttcccgcatggtctccaccagctccaggttccttctggtggatgtgtcaataaccatgtactgtccggtagaatagggggtgatggtggtaatgtgctccagggtgctcttctgggtctcatagatatactgcatcacggcgccggcggcaatgatgcctgtggcatagtcctccagccccagtcccaccagggctcccaccttaaaatgctccatcaggatacggcggcaggattcctcaccgaaaaagcggctgtccagggcagaaataaccacctgatagcggtttttcagctcgtccatatccacgcccgacatgtaaaaggcattgttgcagataatctcagacggggaaaatttgttgatttcgtcaaacagttcccggtccgaatccacctcagtcaccatgaaatccccggtactgatatccgcggtggatattccgtagattccatccatatatacaattcccatcaggtaattgttctttgtctcatccagcacctgggagctggttatggttcccggagtcaccacccggattacctcacgcttcaccaggcccttggcctgcctgggatcctccatctgctctgctatagcgaccttatatcccttctggaccaggcggtacaggtaggaatccaatgcgtgaaacggcaccccgcacataggtgcccgctcagaaagaccgcagtcctttcctgtaagggttatctccagttcctttgatactgtcagggcatcatcgaaaaacatctcatagaaatctcccagacggtaaaacaggacacagtccgggtactccttctttgtctccatataatgctgcatcatgggagataattgtgacaaatctatcaaaatgctgacctctcttctctagtatgcttgtttattcttgttttatcttaatttgccggttattgtttgtctggttctattcattttccttatcagctatatgtcccatataataaaagcccttgctctcctgcagatacaccggcaccagccttccaatcatggatgcatctcccgggaagtgtaccactgtattgttggacaggcggcctgtcataagccccggcgcatggtcgttcacctcttccaccaggacctcctggactgtcctgacatcccgtccacacacctctgccgagatatcctgtacttcctttaaaagcctgtcaaaccgctccttcacaattgcctccggcacctgatcttccatggctgccgccggtgtgccggtacgcttggagtagatgaaggtaaaggcgctgtcaaaccccacccttctcaccacatccatggtctcctcaaagtcctcatctgtctcgcccggaaatcccacaatgatatccgttgtcagtgagatgccaggcactgcctttttaatccgctccgccaaatccagatactgctccttggtatagcgccggttcataaccttcagtatccggctgctgccggactggaggggaaggtgcagatgacggcatatcttttcagacctggccatgacctctatgagttcgtcggacaggtcctttggatgggatgtcataaaacggatccgctcaattccgtctatcttctccacttcctccaaaagctgcgcaaaggtcatgggattgtccaggttctttccataggaatttacattttgtccaaggagcatgatttccaccactccgtccgctgccagcttctgtatttccttaatgatttcttccggcctgcggctgcgctcccttcctcttacatagggtacaatgcagtagctgcagaaattattgcagccaaacataatattgactcccgacttgaaagggaacttgcgctccaccggcaaatcctctacgatctggtccgtatccttccatacatccacaaccatcttcgtttttccctgcttctgtccgccctgggtccgccgctccaggcacagggataccagttccgccagcttgaagatattgtgggttccgaaaatcaaatccacataacggtagcttttcctgattttctccactacttcctcttcctgcatcatgcagccgcacagggctatcatcatgtcaggatgcgtcttcttataggcccccagctgtcccaggcggccgtaaacccgaagattggcattttcccgcaccgtacatgtattaaagagcacaaaatccgctttctctgattctacagcctggtagccgattgtctccaaaatccccagaagcttctccgaatccctggcattcatctggcacccaaaggtgttgatgcagcaggtaaggggacgtcccagcctgcgggaaagttcggccagctgtcccttcgcccgctccatgaagtactgctgacgctccggctccgcagcaggggggtcctggtttatggctgtttctgcattttttatgttgtcaatggtatctctggattcttccatttatctgctccttagcttctataatttagcttctatatttaaatagttctgttcggatattgctttctttcccgaaacgcatagcaggccgggccttttgcacggtccagccaattgcgattaacagtatgaattttactttaaaatggttgggaagtcaaccgggtattcaagcatggctgcaaaacatcccgttttaaatatcttgacaaaataccagcttactgcaggttaaccgctatggcgattgctatggcaacggttcccataaggaagaaaaatgcctgcatcttaatctggaattttgcccattttccccagtcaatcctggcaacacccaggacgccgatcagactggcggaaaccggtgtgaacgcatccacaaatccggctcccatctggaaagccagtactgctacctgacgtgtgacgcctaccaggtccgcaaggggcgccatgatgggcatggtcagggcggcctgtccggagttggaggtcacaatcagattgaaacagctctggaacaggtacataaacagcgctccgataaacgaaggcactcctgcaagcgcatttccaatggtatacaaaatcgtattcagcgtggacgccacatttgcatcggagccgcccagcaccagaagaattcctttggccatacctaccacaaccgcggttccagccaggtcagccacaccgctctggaaggcggacgccataccgttgaccgtcatatcattgagcttaaaaatgaccgcggtcacaccggccgcaaatcccatcacaaagaactgggaggcgatttccggaatataatacccttcctgggtaacaccccagataatccaaaccaggacagccagcatctccagaagaatcagcttatggcccagactgaattccctctcctccgatacagagtccattcttcccctgaaataggcatcactctcatagacaacggagtgggccgggttcttacgtatcttttcagcgtaaatcatcatgtatcctgcggaaagcagagtcacaatcacccacatggccagacggaagccggcgccggacagaaccgggattcccgctatgccctgggccaccgccacagaaaagggactcatccatgaaactgcattgcccacctgggacgccacataggtaacagtgatggccacaatggaatcatagcccagcgcaatcacaaagggcaccataatcatggaaaagggaatgcactcttctgccattccaaaggtggcgcctcccagggaaaacaggataaataacagcggcagagccagacgctccaagccctttgtctttttgatgaaggcgtaaatgcccgcatcaatggcccctgtcttcatgataattccaaaggaacctcccaccaccagaatcaaggcgcagattccaactgcggagccggaacggtcccctgtcaccagtccctcgaacacatagttgaggaagccaaaaccgccgaaatcctctgtgccccacacctttgccgtcttatgaagcttctggctggtatcatagatggattcgccgtactgtccgtacagcacatcatctgtcagccccagttcatccaaatcctcctgggtccactcagaagaatctgtttcaagaaacgcatccagctctgcggggtcaacacccagggattccatcagcgcttcatccccgctcatggctgtcaggttatccttcaccgcttcccggtccagacggtagctgtagcggaacgtgtccgccatcagcacggtcttggtctttaccgcaccgttggaatccgtatattctaccttgtgggtgctgaatttccccgccggaaccaaaaatgtcagcagccagcacaggaatatggcagcaaatataattgcatacgtatggggtgtcttcatctttgtataatcccgctttggggtaccggtattctttttcttgttaaatggcatggttcatatctctccttatgatataaattttaaggccgccctgtatacatgcggcctgtctgacatgcccttccattttaccctaacgcttgaaaattaacaatataaatttcgtatatctattcctgctcttccccgtcatccccatattcctgttccagtctgtctgcccgcttcttttcaatccttactatcaccactcttgtgagcaggaataccacgacaaaggtcagcacccccgggaccgcctctttggcatccaaggttcctgttttcgaggttctccagaaaaccaggatgaataccagtgcgcccactgccacggagacaagattgcgcctgacacgatgttgctggctgccgtatcccggccggtacaggctgaacttcagctgccttgctctgacatactgatacaggggggccagaatcaatatgacatattcaaccacgcagtcccggattccttttcccatcagcagaaccttaaccgcaaatgccgccgccacaaacagatacataagcatggccatctcactcattattttatttcttacctgtgttgttctctcgtccatcatatcagaattctccttccttttcctctgacttccatatctcctgctattcctcccagaacagctcatccagtgtcttgtgaagcgccttgcagattgccaggcaaagattcagcgtagggttgtacttccccgcctctatcatcccaatggtctggcgggtcacccctaccagctcagccagttcttcctgggataaatccataccggccctggctgctttcattttcaggtttttcactgccatccctccctccttacaggcatcgcgtttaaatgcatcagcagcattttattagcattttctcgggccgttcggccttttactcggattgcaattccttcgcaattccttcggcctccgtcttatattacatattataaattatatcgttctaaatgtaaagtatatattgcattttgtttattatattttcttgttctcagcaggaaacctgcatgggagctgacggtatccttggcatttccttgtacttcttaggaggcacacccagtaccttcttaaatgcccgtgaaaaataatattgattgtcatatcccaaatactgggccacctggtatatatgcatgtctgtattgcagagaagatagcaggcctgttccatcttcatgttgatgtagtaatccattggcgcacacttgacacattctttaaaaaccgcgttgagatagctctccgacagccctgcttcccttgcaatccgggtcagtgtcagattctcctgcagatgatccctcatataggttatcacacgattcagatattggctctttgctgtcctgcatcttctctccaaagcaatctcctcttttcctgtttttttgatttcttctgatttctattataaaaaaacaatgggatttatccttgaaaatcatgcgcagaaaagggaatatattgagttttttattcaaaaatgttataattcatgggatataaccagacaatattgagattaaacagaacagatactttaaaaaacgttccaaaaccggaacatacgcaaaaggagtccgcggccatgccttctaaaatccaaatcatcaccaacgaacaccaggaagagctaaaggagcacgggacctatgaatttcccgtccttgtcagcgacgaggccctgtccaggttctacaccagctccttccagtggcactggcatacggaaatcgagcttaccctcatcacagaggggactatggtatatcaaattaatgaccagatcttttatcccagggccggacaggcgctcttcggcaactccaataccatgcacaccgggcgcatggaaaacggccgtgactgcaggtacatctccattaccttccaccccagactgctgtacggctaccagggaagccggattgccagccggtatacggaccctctgatggaaaacgccgccctgccggctgtctgcttcgacctgtcgcaggaatggcacggggaagcggtcgggcttctggaggatattatacgcatcgacagcctgcgctatgatacctatgaaatggacatccagatggacctgttccgtttctggaagcttttataccttcactgccgccctgaccgggaaccggcacatacggcgggcaggaagaaccaggaacggattcgtcagatgctctccttcatccatgaaaactatcagtctgatatcaccctggatgatatttcccgccacatccatatctgcaaaagcgagtgctgccgggtctttaagggttacatgaaggaatccctgtttgaatacctgctaaaataccgcattgaaaagagtattcccgatgtgctggagggaaaactgaccatgaccgagacagccataagggccggcttcaccgaccccaattacttctccaaggtgttccacaagataaagggctgctctccgagaagctaccggaaaacccggtcctccccgctgccgtgattccggtctcccgcaccgctgcccggcccgggcctctgcacggccttggtgactccggtccgtttcaccttgtcaatgccgcccgacatgtggggaatccggttccccacaaaaacagccctctgcacgcagtcctccccataccgttttcttatctcatccacagccgtgtccagcctggcgtatttatcatggagtcccctgtcaaaaagctgatactgataatggccttttgggctgaccttgcttgtatggacccccatctggcggatgggagaatgattccacaggcggtcaaacaggctccgggccgcctcatagatttccagggtggtatctgtagccgaaatcagggtggtctgaccggatccatggcgaaattccctgtccgtgatggaaatacccacgcaggcagcttccatgctgtcagcccgcagcctggcgcacacggtttccgtaagggataatatgacctgttctgccgtctcccgatccgtcacatctgacggcgtggtcatagaattgccgtaccccttattctgcggaagctctctcaaaaatggagacacatcccttccattggcataattccagataaactccccctgtttttttagatgcctttttaacagttccaaatccgaggcagccagagcccctatggtccttattcccagcgccctcagctttctcaccgtggccggccccacccagaacagttcatttacaggcagcggccacatcttcctctctatctcccaggtaaacagggtgtggacctggtccggcttttggaattcagaagccatcttggccagcagcttgctgtccgacacaccgatgttcacggtaaaacccagctcccggcgtatttcttccttcagctggtgcgcaaacgctgtgtgcgttccccataatcccattgtgccctccacctggcagaacgcctcatctatactgtactggtgaacatagggaaaatacttcttaagcagctccacaagagcgctggagcagctcacatacaggctgtagtccggaggtacgattacaagccccggacatttgcatctggcctctgccagtgtttcccctgtcctgattccataccctttggcagaggaggatttcgccagcacaatgccatgccgttctgcctcgcttcctccgatgacagagggaaggtcccgcagatccaaatcctcccccaggatacagaccctgtatgcggctgtccagcttaaataggcgctgttcacatccacatggtaccatacctgatctttttggcttctcatgacagtgtcctgaaaaatgaccacttatgggtagatatgcggtatctcagctcaataagacgtctctggccctctgccacggcccagcacacaaagctgatatgctccatgccgcaaaacttctcttccctggaagagacaatgctctcaatcttcaccgtgatgattccgtgctccttattctcataccggaaccagaggggcgtcatatctcccagggtgctgcaggcgccaaacatctgtatgggtatatttaaagccgccactgctttcacctcctggttccaatatatcagaacatatgttctatttcaagtggtaattgctgggagccggttattgcgccggccaaatcatctattgaatcgtaaaacggttcttctcatatgaaatcaccccgtccctctgcattctggacagctccgccgacagcgcgcttctgtccacggacagatagtccgccatctgctggcggttaaagggcactgtgacggtacggcacccctgctttacggattcctgggacaggtacaccatgaccctctcccgcagggatttaggcgtgataatatccattttcttcgtaagcatcaggtttttcccggccagcacatacatcaggctccgtatcagacggttgtggaagtcacagctggatgaacaggtggttaggatgcggttcacgtccatgaacaggattctggagcgttccgatgcctgcacatccaccatcaggggttcccccttaagacatgcatacgtctccccgaatatctgccctccgcctatattctcaatgattttcctgtttccccacacgtcgtccttaatgatgttcaccgccccttccatcaccacccccagacggcctgtcacatcaccggccctgtatatataagcatccttcccataggtcctctcttccgctgaaaagcatgttagcatggcctctatttcatgctccctgattccctgaaacagcattgttcctgccagcaaatgaatatccatatttttctcccttatcgttgtttcaacaacttacttgttgttgaaattatattatactttccccataccgtcaagggcaggcagaacataccgcctgctcacacatatttacgaggaggatatatcatggaacacaatatgttttgttttcaatgcgaacagaccgcaggatgcagcggatgtatgggaaaagcaggtgtgtgcggcaagacagctgccactgccaggattcaggatgaacttacaggagccctcatcggccttgccagggcgtcagaaggaaaagaccgctctccggaagcagaccgcctgattgtaaggggactgtttgccacccttaccaatgtaagctttgatgacagcgccctgaatgagcttcttgcggaggccggacgcttaaaacattccctgtcccccatgtgcggatcctgtacggcagattgcagccggacagaagattttgacatgaacagactctggtcagaggatgaggatatacgttcccttaaatccctgattcttttcggcatgagaggaatggccgcctatgcgtaccatgccatggtgctgggccatgaggacagaggagtcatggactatttttataaggggctgtctgccgttggttatgacagctatacggttcaggatctgctccccattgtcatggaactgggcgccgtaaacctggactgcatggcactgttggacagggccaaccgccaggccttcggcatcccggctccggcacaggtaagccttaccgtggaacagggaccctttatcgtcatttcaggccatgaccttcacgacttaaagcttctgctggagcagacccagggccggggaatcaacatatacacccacggggaaatgcttcccgcccacgcctacccggagctcagaaaatacagccatctgaaaggcaatttcggaaccgcatggcagaatcagcagaaggaattttcggaccttcccgcccctgtgctttttaccaccaactgcctgatgccgcccaaaccctcttactctgaccgggtatttaccaccgccctggtgtcctatccgggcatcgtccatattgacggccgcaaagacttctctccagtcatccaaaaggccctggagcttggcggcttcaaggaggatgtgactatccccggaatcaacggcggcaccaaggtcaccaccggatttgggcgggaagccattctggctgctgcgggcaccgtggcacaggcagtcagacagaacaggctgcgccacattttcctggtaggaggctgcgacggagcccgtcccggcaggaattactacacggactttgtaaagcaggcgcctgaggacacccttattctgaccctggcctgcggcaaataccgctttaatgacctggagcttggaaccctggccggcattccccgccttctggacatgggacagtgcaacgatgcattcggcgccatccaggtggccgcagccctggcagaagcattcggctgccaggtcaatgaccttccccttaccctggttctgtcctggtacgaacagaaagctgtctgtatccttttaagcctgctgcatctgggtatcaggaacatttaccttggccccacccttcccgcctttctctctccggccatactggaatatctgaccgagcagtttgaaatccatcccatctccacaccggagcatgacctggccgcgattctcgcctgaaattccggccgtgaacagggacctgtacgccgcaccggcatacaggtccctgttttattgttccctaatcttgataaatacgtattccttatccccggatttctcctggcagtagcgataccccagacggtcaaaccccttaagcccctccgcgtcccggacgccccgctccgccataaaccggaccatctctcctctggccatcttggcctcggtggctttcacctttaccttaagaccgcctgttccgtcctctgcaagggttccgaacacacaggtcacataatcaatatgggcttccagatagggttccactgccctgctgtattcttttgaggccagattcacaatcaatgtctcatccgcggccagttcccggcagatagagcttccccagtagtcataaaggcttttgatacctgacggaagctccacctttgcctgcatctccaggcggtacggcacgatgccgtccaggggcttaaggataccgtaaaacccggacagaatgcgcagatgctcctgcacataatcccactgtccctgctcaaacaccccaggcgccatgtactgatactggattccctcgtaggataagagggccggggtcaggcgcctttcaaggtccatctctttaaaacggccgtaattaagcagggctatcttttcattgcactgccacagcttcctggcctggtctaagtccaggccctgtatgtatctcttcagttcttctgccctggaaaggaaacagggaagattcgcccattccagctcgtcttccctgatattcattttcttggcaggtgatatgattatcttcatcctgtctcttactccgttttctcttattccactttctctatctttggaaaatacgtaaacagcaccttggctataatcttgtccttctccacaaactggttcttccagaaccgggcatccagggaattgttcctgttgtctcccatcatgaagtagcatccctccggcactgtatagggaccgtaggagccttccattggttcgggaaggtagggttcgtcaaggggcgtgtctgaatcattgatatagacttttccgtccaccacgttcacggtttcaccgggaagccctatgacacgctttacgtagtagatttttcccgttggatcgtccgggaaatggaaaatcaccacatcccctctctcagggtcgctggtcagataggacagcctggatccgatgacacggctcttggacatgatggtattctccatggagccggttggcacacggctgttggctatgataaagttgttaaggaccagggcgatgatgaccgctgccacgataatctgtatccagctgataatctcctttttccagctgaagggttcttcctcctgctgtttcctgctccttttcctgctgttttcctcttcgagcatatatatttcctcttttcctgcattctgtctgacaaagccgggaacaaatgtaaaatgtcccggctcctctgtagctgtaatcagcgaatctgtccatctccgtaaataatatacttggtagtggtcagttccttaaggcccatggggcctctggcgtgaagcttctgggtgctgatgccgatttctgctccgaaaccgaattcctcaccgtctgtaaagcgggtggaagcattgacgtagacagccgcagcgtccacctcatttaaaaatgtctgggcattgaaataatcagaggtcacgattgtttccgagtgacctgtattgtaggtattgatatggcggatggcctcatccacagagtccaccagctttaaggacaggatataatccaggtactccctgccccagtcctcctcggtggccctgacaaaggaaggttcaatggcacaggcgtcctcgtctccccggatctccacctgcttttcctccagcttcttcctgagaaggggcaggaattcctttgcaatgctcctgtgcaccagaagggactcgcatgcattgcacacgccgattctctgggtcttggcattgaagataatgtccagggccatattctggtccgcggaagcgtccacatatacatggcagttgccggtgcccgtctctatgacagggatggtgctgttctccaccacggtctttataagtcccgcccctcctctggggatgagcacgtcaatgtacctgttcaggcgcatcagctccctggtggtatccctgctggtatcctcaatcagctggaccgaatcctcgggcaggccggcgcttgcgagtccggcgcgcaggcaccgggtaatggccatattggaatgaagggcgtcgcttccgccctttaagataaccgcatttcctgatttgaagcagaggccgaaggcgtctgccgtcacattggggcgggcctcataaatcatgccgataacccccagaggcacacgcttctgcccaatctgaaggccgttggggcgaagcttcatggacagcacctctcccacagggtcctccagggaggccacctgcagcaggccgtccgccatggcctgaaccctggccggcgtcagcttaagacggtccagcagtccctggctcatgccgccggacctggccttctcataatccatagaattggcctccaggatttcctcctcgccttccagcaaagccctggccgcttcctccagtcccatattcttctccctggagcccagggtacccagtacacgcgatacttctttggcacggctgcctatttcattcaatgtcatcataatctccccttcacaatgcatcagacttccttgattccgccatgtttctttcccaaatccgtgatggagccgtccggctccttgatggatatgttgttcaggttattgcggaggcttccccgtatagctgcaacgtactcctggcgcagccgggcctgttcctccttctcctcctctgtcagccccactgactgggacttgtggtacagttcgttgatgcggtcaatccttgacgcgtccatacattcacctctttcagggcctggcgcccggccgggcgccttccctagtattcattgttcagataatgcatcaggtcaaaatccagattggtatgggccaggaacagggttcccttttccttgcccgacatgatgtccagtatgacatccacctggtctccgttggctatgaccatatcggctccgctgtccgtggcaatccgggccgctgccagcttggccgacattcccccggtacccacgtcgctgcccgacgtatccttgcccatacgcaggaattccggcgtaatttcaggcaccaggctgataaatccggcctccgggttctccctggggtcatctgtgtaaaggccgtctatgtcagacagcaggatgagcaggtctgccccaatcagagccgccacaatggctgacagccggtcattatcaccgaagctgtccacatatggaatctccgaggtggataccgtatcgttttcattgacaatgggtatggttcccaggtttaacagctcgtcaaaggtattctgggcattgtacctggaagaatcattgaccatggtgtcctttgtgagaaggacctgggcagctgtctggttgtattccgcaaacagcttctggtaaatcatcatgagcctggcctggcccacagccgcaaaggcctgcttctcagcaagggtatccggcttcctgtgacggcccagggcctgccgccccgccgcaatggcgccggaggacaccaggaccacgtcctttccctgtccccgcaggtcgctgacaacccgcaccagcttttctatcttcatcaggttcacttcccctgtctgagcatgggtaagggaagatgagccaattttaatcacaatcctctgtttatccgcaagattctgacgttcctgggtttccatgatatactcctttatctcatcaaacgattcctgtttatcttacaccaatttacaggtcacgtcaatttctatgttgtaaatgttcctatcatgttttagccactgtccgggacggacgtaaggggttgtacctgcggataatctcttctgccgtcttgattccgtccatggctgccgaggtaattccccctgcataacccgctccctcaccgcagggaaagattccctttacagggctttccattccctggtctctgggaatgcggaccggggacgaggtacggctctcaatgccagccaggatggcatccggccggtcaaagccgcgaatcatggttccaaatccttccattccttccatgaaagcccgggacaatggttccggaaacagctccctgagattggcaaaggcatacccgcccctgaaggcgggattcacaccgccaaatccctctgagacacggccttccttaaaatcaccgtagagctgtaccggtatgtttccctttcccaggcagaaagcggtctcctccaggcgcctctggaaccggattcctgccatggcatccccaggcacttcgcagccctggtctgttccggctccagtctccatcccgcagaaatcttccggcgtgaccgtgacaataatggcgctgttggcattttcccctgccctgtcatgatagctcatgccgttgaccgccaggcggcccggctcagaggacgcattgaccacgtagcctccggggcacatgcagaaggaatagactcctctttcgtcagaagccttccatgtaagcttgtagctggccggccccaattcaccgcattccttcatgccgtactggctctcattgatcagcgtctggggatgctgtaccctcagtcccaccgcgaatgcctttggctccatggggattcctctggccagcagggtctcaaaggtatccctggcgctgtgtccgatggccagcaccactgtctccgcctcaagaacctggctgccgttgacaacaagggcttttatgcgcctggattcccccggctccccccccgtcacaaaatccgttacctggctttggaaaaggacctggcctcccagcttttcaatctctgtccgtatggatttgacaatgcggcttaatacatcggttccgatgtggggcttattcacatacaggatagacgggtccccgccgaactctgtcagtatgcgcagcacttccctgtttcttccaaaggtatcctttacaagggtgttaagctttccgtcagaaaatgttcctgccccgccttccccgaactgcacattggaggacgggtcaagctgccctgtttcccagaaccgggccacccggtccgtcctcgcgtccacgtcctccccccgttccagaagtatgggcatgtacccctttctggccagcataaggccgcagaacagtccggccgggccggtgccgataatgacaggccggcccgccatacactcagtacccggctcaggaagccggtaaggtgcttccttatggaccgccacattccggtccttcagcctgcgcaccagcttttcctccttctggagtccggcctgcctgattcctatgtccaccacgtaactgtaccatatatccggcttctttctggcgtccacggactgcttgacgatggtaagcttctctatctcccctgacggaacacgcagtaccctggcagctttctccaaaaggccggccctgtcgtgtcccaggggcatttttaactgattaatacgaatcattttctgttcctctttccgtctggggcaggggcatatgccccatgtgccgccgccttatttgcgcctgcctcatgtttcccaacggaatgtcctcccgccgcatgtgtccccgctatcataccgctggaccaggcaaactgcaggttgtatccgccgcagattccatccacatccagcaattctcccgccagatacagattagcatgaagcctggattccatggtggcggcatccacctcaccggtgtccaccccgccgcagcacacctgggcattggcaaagggattcactgacatgacaatggcttcataggactttatctgtcccagaagcagtttcagctgttttggggacagatccccggacttctgggacggtttgatgcctgccagcttaatgagaaccagggccagcttcttgttcagcagacctgtaaacagttcctccaccgtcttatggcccagaagagacgcgcgctttttaagcaggccaaaggcctcaccgtcatcccaggacggcataaagtccaccagggctgtgaccctcttaccctggtccagggccctggccgcaaaccggctgacctggaatacagggatgccggacaggccgtaatctgtcagctgcagctctcccctgtcccgggccagcagttcaccggccgccatgagctttaccccggcctccgtacggatacccgccatctgccggtacaggtttccctggcaccgcagctgcaccagggcgggaaggggtttaatcacccggtgtcccagtctccctgccagctcatagccgcttccgtctgaaccggtggacggagctgccttggagccggctgccagaatcactgcgtccgcgtccagtatgccctggtctgtatacactttataacagacgtgaccgccgccggccgccggctctatcttctccacacggcacgaaagaagcaccgccacgcccagtcgctccacctcgctgcggagcacgtctaacacagccgatgcctggtccgaattgggataaatatatccgtttctgtcctttggctctattccaagacctttaaaaaaagccagggtctcatccaccccaaagccccggataacttccatgggaaactccttccggccgcagcggtaacagtccgcctccatccgcagattggtcaggttgcacctgccgttgcccgtggacaggattttctttcccacccggtccatgtgctccacaatggtcacatgggccccgttcctggccccgccaatagccgcagtcagtcccgaggccccgcctcctatgatgacgattcgttttctcatgattgttccaaagctccttatcctgctcttaatgctcttaagtttacaccccattttatatgtttttctgccacatttcaactgtttcctgttatttacggcgccggactgccaaaagcccgcccaaacagccgcctcaaatcctggtattcgcagaaaggaccggattcccagtgcggaaatccggtcccttttaacccctgcctcacgtattactttgcttccatgtattactttgcttccatatatcactttactttcatgtattaatctgcttccacagatggatacctctattcttcatccgtaaaaatgaaacagacaatccgaccgccgcatagccggatctcatcagcttgtatacgattccaaataatggtatacatccatcatagacggaaaccatatgccctccatcagcttctccctctccttttccggaaaatccgtgacaggaatatgggtatagaggcagatggtgctgcggtcgctgcagaataccaggagaaagccggactccgacacaagatagtattcttctgccggagaaacgctttccagtattggctttacctgttcctggttcatggcggccctgtcatccacatcgttgactgtctccgtctcaatgaccgtattgggaactgcctgttcctgcctgacgctataccgggtaattccatacgcaacaatgagacacacaatggatgtgactgcaaacagggcaaagcagtataataacttcttcatgcactaacctcctcgccggcccaggccccgccatgccggtcagcatggcgccggacgccgctttaaggttagtatctgctttcttattctgttttaatcatgcattctcaaatttttcctgataaatacaacaaacacgcccttttgtcgcttatcccagaagccggaaccggttcaaaagacggaccagtctccttcctcccggcattcccttaagctcttcctcctccactgccctgaaccttacaaggagcacggcatagaccaggatggccactgccaccgaggggaacaccacaatggccatacccatcctgcccctcatcagctggtcgggaagcagggcgtaaatgcctctgtataccccataagcggccgctcccatgaagccggcgcatattgtgggcaggatgagcgttctcttatattcctgcctgtatctggcaaacctggcaatggcatgtccatttaacagacacatcacaagggcaaatataatattggcaaacaccacactgtaaattcccatcttaaataccataaggaacacttccagcaccgccacatgaatgaccagggcaatgacggcatggcgtatgggcacatccatgtggttcaggccctggaggacagcgtttgtaacagttgacagggagtagaataccacggccagggaaccagccatggagagccgtatcagcatggtattgtcctcactgataaacagcaggttgcagaccggcttagccaacaccgtaattcccactgctgccggaatggcaatcagcagggaaaaacggatggaggttgcaatccgctccagcttctcctttctgttcctgtttgcaactgcccttgtgagggacggtatcagagaggatgaaagggcgttggaaacagccaccggtatattaaagagcagctggtactgtcccagcacgccccagtaggtggcaatggaatcctccatataccccagcttgtccatgccctggccgaacaggtaattgtccaccacattggagcagttgtagatgccgctgctgatgacaatgggcagcacggtaatggtgagcacataaaatatccggcggtagctctccgtcctccccgacacatcctcccggaccatctgccttctctcccgccctttggatgcggtaaggcatataaaaaacagaaaagccgtgagcgctcctgccccggtgccgatggtgccgcccgcagcccccagcgcataggaataatcctttgccccctgggcagcattaatggacgtacccacgccaaagagaattccggctgcgaccacgctgaccaccgcgttgacaatctgttctaaaatctgtgatacggccgttggcaccatggtgcccgtcccctggaaatatcctctgagcacgcccagatatgccatgatccagatggtgggcgccagggtctttaaggcgtaccggctgaaaggcgtcttgatgagttgtgcgaacaaatccgccccaaaccacagaaccaccgccgctatgcctcccactgccgtagcataaataagagccgcttttaagatgcggctgcagtttctgtgctccccccttgccagccgggcagatatcatcttcgacactgccaccggcatgctgtaggaggataatataaggaggatattatacacgttgaaggctgacgtataatatccgtttccctgttttccgataatatcgttaaggggcatcctgtaaagcatgccgataatgcgtaccacgataccggccatggccaggatgcttccctgtatgacaaaattagctgctttctgtttcctggtttttttcctgcttgtccttggattcatgtttattactgtgtatcctcatttccgataatttccgacttggcaaagtccctggtgggaatgatgcagacccatgtctttccctgattcagcacaacttcatcgtggttggcatcgaagtaacgggtgggaccgaattctccgtccttttcccagttaataggaatcgctttgccgtcagtcataaaatacccgcattccgtagtatgtacattgatatccagataatccgtggtggcgtaatgaccggtctggcagtactggaaaatcacatttttcaccgcaacaggcccttcatccccctgatggatgccgccgtactggtaacggtggtaaagcccgtccgaagggtcgtacacaaagtatgcctggttcatgatatatccggtctttgccgtgcctgcgtccatgactcccggacgctctgtcagggatgcctccctgccgtccctggcaaaaagataatggcccttgtaggacggggcgtaagactgggtgtaccccagcttctctatggaggccgtaatcctgtccccgctggtatatgcattatgaggcgatttcttgtcctttgtgcggtaaaaggccagatcgccgatggcgtccagaccgttgatatggtccacatttttcaggtaaggcttggcaaaggtgctctgtccaaagtgtacatagacagcgtcaaactccctggcaaaataggtgtagtaggtccggcagctgcgcacggaaccaatgcgttccagaccgtcgtaatcctctatcagggccatgtaccggttcatgcctccctccaccggcgcctcatagaccacccccgccctgttaatgccgtactggggcctggcttccttgtcattgctcatcatcacagccgcgggccggcggtttcccttggcggtttccaccatctggccggtcagatagctgcgaatcataccgttttcctctgtccgttcctcaggaagataaaatgccggcaggtttccggtgtcctccttttttgtctccgggtcagaccggatgatgatatcgggttcagcggcctcagtggtggcaggaggctcctgaaccgtggttgcttccacgctggcttccctggcgcagcccgtcaaaaggactgctgccgtcagtcctgccgttaaaccgattgccatccatctgaacccgtttctcatcttgtataccccctggtttccagtatctctttctgcttttcctccatcaccagccgctcgccgtcctccatatggtcgtaaccaaacaggtggagcatgctgtgggctgtcaggaaggccagctccctggtctgggaatggccgtatttctcagcctgttcctccaccttatccacggaaatcacaatatcccccagcatcagctctccggtttcaggattgaagtaatcctccacagcctcctccacatggtcaaaatccgatggcgactcataatccaccataggaaaggacagcacgtccgtgggagcgtcaatctgacggtgctcccggttgatttcctgtatggcgtcattgtccgtaagaatgacattgacctctgcctcatagggacagccctcataatccagggcagccagcacagtgtcctcgatgatttcccggtagggcaaatccagtaccttttctgcttcgtattcaattgaaatggtcatactcacttctccttggcggattaattccgctcccgtatcctgcgccgtcctgcaggcggggtattcttttgttcatatgtctcataggcctgtacaattttctgcaccagcggatgacgcaccacgtcggaactggtcaggtagcagaacccgatgtcgtcaatccgtttcagcaccttaagggcagtgtccagaccggaaacagcgtctcccggaaggtccttctgggtctggtctcctgttatgatgaccttggaaccaaaaccgattctggtcaggaacatcttcatctgggccggggtggtgttctgggcctcatccaggataatgtaggcgttgtccagggttcttcctctcatataggccaggggcgccacctcaataagccccttctccgaattgtggagatagctttccgcccccataatctggtacagggcgtcataaagaggacgcagatacgggtcaatcttgctctggagatcgcccggcaggaatcccagcttttctccggcctcaatggccggcctggtaaggataatgcgccccacctcgccgttcttaaaggcctggatggccatggccatggcaaggtatgtctttcccgtgccggccggtccgatgccgaacacaatcatcttcttgcggatagcatccacataatgcttctgccccagcgtctttggctttaccggcttgccggatatggtccggcatatgatatccttgtcaatctccagaatctgcccgtcattctccgtaaaagacagggacagggcataatccacgttttgttccgtaatggtattgcccctcttggacagttcaatcaggttgttgaacacgctttttgcctggcctatagttttctctggtccgataatttttatttcgccgtccctggcaatcatggtcacatgcagggtgcgctctatcttctttaagtaggtgtcaaattgtccgcagacattccgctcatgctctgcgggaatgtcaatcattgtctcaattacactcattcagcagttattgtctcctctggtttttctcccggctctccgccggaattcatatcaggctccgctgccggctgtgtcttaacaatggattcctctgtgacgagttcacctgtcagacggcattcagaaacacttgtttctattctatcattattttcaagaatttgtacccccttttcctctaaatttttgacaaattggtaatttatggctttagacagctcctttaactcatcctccctgtaatttctctcataagcagccatttcccggccctgtatggcgcctatatagacaggaagatagaaattggaaaacagcctcagctgtttttcctccatggaataatcccactccccctgtccccttaccggggtcaggaaggtaaaggaccaggccccggccttcatgtaccaccctctccgcctgcgccccgtatggacacgttcctgatgcagcagaggaaatgttttctcatattgtttgacggttctggccacaatatccgcatccgcgtgaaccatgtaggcattgatctcctcctcgttgtcaccgataatgggtacccggccgctgaccagtacctgtccctcctccacctggtcccccacacagacctgggcaaccccctggcgcaccaccatggaggtgatgattccgggctgggacgccacaatgtcgcagggtgtctcgtccttctcagggatagtggacagcacctcgttttccttgatgtggatgagcagccttgtgccggaaacacgggcagacacccaggttatctcgggaaagcttgtgcgcatggaggcttccagatcctcgcagttaatcctggcctttagcatgccgtaatcaatgtcctgggtgtccagaaaacggaccagagtatcgtaggtatacctgtaattaccctcaaactggatatcccagataaacagggacatgacgtaaagcaccaggaaaaaggccatgattccggcaccgtaataccagcgcttcctgtgcctgtaaataaaaaatgggaggccgaaacggccggtaatgtgcagccttacctgtgccttgcgcaccaggggcttcacccggcggtatccttccacagtcataaaaaactcataatccccgtcccggttgcatatcagtccccatacctccagacccctggcattgcagagattcaggaaacgttccggtgaatagccgtgaagacggagtcttacatatccttcccaattatgtaacagccattcaatcaaacaggcccctcctttgatttatgtttcaaattccaaagaaccgacctggccggttatcttcatctcctccgccgtataataatcaatctttaagcgggctccgtgaatcaccaccttgcagttcctggcctggagcttaatcagggtatccgtgtaaatcaggatgctcctgtaattttccacattcacctggctcctgcccacaaagcttataagcacatcccccagaatcacgtcccggggcagccccagtgcggatacggctgttttctttggttcccatgacatacgcccacgctcctgatacactggttccttttattatatgcatcagcctgccaaaaatgcagttccctttttttcaaaaacatacacattccttcttccatatgaatagactatagtgaatcaatcttttgcgaggtctctatgaacaatcagtcctatcatacagacagaatgaatgagtatccggacaccctcctgaccacggcagagctgggggaggccgatgttcccgttactcctcttcccaatccgggcgagggcggtcctgtggacagcggcggcaatcagaataacggcgccaatgtcccggtcatacctcttcccaatccaggtgaaggcggccctgtggacagcggcaaccgtcccggctttccgcctatcttccggcctattttccccggcaacagcggttctgtcaccgtgattcccggcgtcaccttcccatgctacaactgcaccgccaccagcttcggcagggtgcgcatcctcaatgcttccaccgggtaccagcccttttacgtgtacctgggcaactggatggtggcaagcggcctggggaatggggacataacaggctacgtccagtctgcctccggcacccagaccgtcaccgtgtcaggagccaacggctatgtgtacatccagaagaccgtgcaggtacgcgcctccgcctccatgaccattgccatcatcaatacggcaagcggcctggacatcatggaaatatccgacatctcctgcaacgcgccttccggcaccagctgtctgcggacctgcaacctttcgctgaacctggggcccttcgacgtatccatcggcaaccagaactcctcctatactgcgttcagcaatgtacgctacagggaagtgaccccttacaccagcttctatccggggtggtaccagctctacatctccaggaccggctcctatcccaacacctcagtggcaaccacctccgccaacatgagcgccaatacatcctacactctgtatatcttcaatgccccaaacgcaacggatgggctgaagacgctggtggtgtccaactaaacggaaataatataaaaaaaccatattcctgttattatcagaaagcctcaggaaaaaaacaaatatccagccggattttctcccagaaaaaatccggctggattacttagtattgtctcatgtcctgattccatattcccgcagcttgcgccaaagcgtggaacggctgatgccaagagctttggctgtgttgcccttatggtaatggcaggatgcaagggtcttagtaataatacgctgttcgtcctcctcatcagagaggactgaacctgtcccgagcgggattcctccctgtaaggatacagcggccacaaggtctgcatccaccgcaaaaccgttgcagagcactgcaaggcgttcgcaaaaattaaaaagctgccgcacattaccgggccagtccatctgctctaagtatgcttttgcttcatctgttatccgtatatcaggaaacgcgcgtttcatataggaatccgcaagcagagaaatatcctccctgcgctggttcagagagggaatattgatccgcagcacatccaggcggtacaataaatcctcccgaaactgacgctcagccgccagctgctccagattctggttggtagccgccaggatgcggatatccacgggaatgacagaatctcccccgacccgcataatctccctctcctgaagaacccgcagtagtttcgcctgcagcggcagtgaaatctctccgatttcgtccaaaaaaagggttcctttgtgggccagctcaaaaagtcccgcctttccgtccctgtgcgctcctgtaaaagcccccggtacataaccgaacagctcgctttccagaagctgttccggaatagcagcacaattaacagccacaaagggcatccgcctgcgctggctgtcattatggatgctttgagcgaacatctcttttcctgttccgctttgtccaatcagaagaatattggaggacgtccggctgtatcttcttgccgtctccacagtcgatatcataaccggcgactctcccgtgatatcgtcaaacctgtagcgggcaatatggccccttttacagatccgttttcggatgtcatgctccatgctctggatttctttcactgcctgcacattgaccacatacccgcagatggatgattggattttcagaacgtttttacttacattcagcatattgctgccatattggacaaggcggttcacatattcttcatcgcctgccagtacatccttaagctcccctccaagggacagggcgtcaacgggcaggtgctccccgtctattccaaggacagactgcgctttcctgttcatggctgtaagcttaaaatcagggtcaatcagcagaatgccatcgtgtgatatgtccagcaaagcctgcaggcgaagggctttctcctgttccttccggaaaatggaccaggtgcgtttgacgtcggacagcgcgttccaaaacgcttcctggctggtttggatcatcataaaggatacatgattctccgcagcataacggcaggtatttactcctcccaatatcaccttgcacccctctgacacagcacgtttcaccagcatttcattattccagtcaggtgtcaaaacaaaggtcctgataggagcctcgcttaaatccgaaagctctgtaatgccgtcaagcatgttgccggctgctatgattccgattttttgttttccgtaatgctcaacgcaattgcgtatggtcctcagaatatccgcagccggaaccgtaatttccactaccgggatattttttgacaaactggccaggatttcagcgagaagtcctctggtgagtactatgtcggcctcaatcttaatctggttcacattttcactggtgacaataacctcctccatctcatagttttcctgatcaaccgctctgtaaaattcattatgttgtctgaaaatctggtaagcgttctcaataaaacccttgtaaggaacagccagtgctatttttatcatatgtatcactttccttctttctcatgcatataccgcagaacacatctgtatcctgtaaatctaaaacagaactcagatatagaacaaatcgttttattcgagctatatagttgaaacaaaatgtgtcatatcgtattccgcatccatcttgcccatattaaaacaaatcggcataaatcacataaaataacataaatccatcatgttttctgaaaatagtttggttttgcaaatctggcatgaaatttgctttattatattacataaaactggcagttttttgtatatttcatctctgcaaagaaaacaaaagaaaggaattattgggtgaaaaaatggttatggttttaattgtggttttaggaattgctttcctgctgcttctggtattaaagtgcaaactccatgcgtttatcgcgctcttaatcgcttccatcgcggtgggtgtggcagccggaatgccattaacagacattacggcaagtattcaaaacggtatgggaggtactctcggcacagtggccatcatagtgggactgggagccgtgttcggccagatgctggaggcatccggcggcgctcaggccctggctaaaagcatgatccgtttcttcggtgagaagcatgccccgcttgcttttgctgtcactggattcattattgcgatccctgtttttttcgatgttgggttcattatcctgctgcctctgatttatgcagtggcatacaaaacaaaacgctccgtcgcaacatttgcatttcccctgattatttctttatgtctgaccaatgcatttgtgcctcccacaccgggtccggtagcaacatgcagcgcattagacgcaaatgtagggtgggtcatcttttttggaatcattatttccattccccttacactggtgggttatctttattcaattaaatacattgataagcacctttttatccctgtgccggattacatgattcccgaagagtcaaacgatgaaaacctgccttctttttccagtgtaatccttatcattgcagttcccatcctcctaatcctggtcaatacaggcgtggatgccctggtcaatgagggaatcctggcagacagtttctttacacaggccgcaaaattcttaggtacatcctacattgctttgctgatagctgtattgctttcattttacattctcggcaagcgcagaggctttcacaaagaagatctgtacgaaatatcctctaaagcattcctgcccgtgggtttgatcattctggtaaccggagccggaggtgtgtttaagcagatacttttggacagcggcgtaggagatgttatagcacaatccgtggagaccatcggccttccacctattattttggggtatctggttgctgtatttataagagtcagccagggcagcggcatggtagccatgataacagccgccggtattgtcagccctttgctcgctatttcccctgtatcggaaatgcagagagccctggttgtattggcgattgccgctggttcagtggctgcttcccatgtaaacgacagcggcttctggctggtctgcaaatatctgaacatgacggaaggccaaacgctgaaaacatggacgttcatcaccgcattcctctctctctgttccctggttctggtaatcctgctcagcttaatagtaccgtaaaaaactcatgtccgcttttctatgacaaaaaatcccctgctgcagattgtggtaaatctgccgcaggggacttcccattccatggccccaatacagcacaaccctctaacccagccgtgctccatttgggcaatgcccttgtttattcatcccagttatggtacacagcctggacatcgtcatcctcatccagcaaatccagtgtacggtttaacttcttgatatcatcctcatcggtcagctccacccatgtctggggaatcatggtcacatccgcctgcatcatgggaatgctctgggcctccagtgcctcgcgcaccgcgctgaaatcctcaggcgccgtaacgacctcgtagctgtcctcctcctcggagaaatcctctgctcctgcatccagggcaagcatcatcagctcatccggatccatgtcgcactcttccttgtcaatgatgatctgtccctttttgtcaaacatataggacacgcttcccggtgtgcctacgttgccgccgccctttgtaaaggcgctcctcacattggcagccgtacggttcttattgtcggtcagtgtatctacgatgatagctacgccgttggggccgtatccctcgtatgtgagggtctcgtagtttacggaattggcatcgcctgccgccttcttgatgccgcggtcaatggtatcattgggcatgttgttggcctttgccttggcgatgacgtccctcagtttactgttattggccggatctgccccgccctcttttacagcgactgcaatctcacggccgatgacagtgaagattttgcccttggcagcgtcgttgcgctctttcttatgtttaatgttggcaaactttgaatgtcctgacattggtaaacaccctttcctgtttcttcttttatggtttatatatggtttatacgttcaaatacagccttctgctgtattttatacacatcttttctatattaacacgattttttttatatggcaagaaaaattcttcggccggcagacccttttgcccagcccctgtctgccagactcaccccacatctgaagccaggttcctgagccacttcttctgcctgtaccgtatatatcccagaacagccttatatacctcttccgtcataaccagggcatacactgtatagataggcagcctccacaccagggctcccaaaaacgccagcggtacgccgatgaaccacacgccgctggtatcaaggaacagacacatcttggtatcgccgccgcttctcagcacacccaccacattgacataattgaacatcttggccggcatgtaggccgcaaaaatcaggatgcacaggcttacgtcccgggccacctcaggcgtaatgttgtaaaggccgatgatgggccagcgaatgccaatcagcaccactgccacgcctaccgtggcaatgaactggaggatgaagaaatgcaccgcatacttctccgcccgcttgagatggcctgcccccagctcattgcccaggataacggcagtggccgcgctcaggccctggaacaataccaccagtatatcctgtatggtggtggcaatggtgatggccgccactgcctcgtcccccatgcgcccgtatgccagagaatacatggtggtgcccagcccccacatgaactcattggcaatgacaggggctgatgtgccgaaaaaccggctgacaaacagtctgctccagccaaacaaatcctgaaggccgcaggccaccggaagcctttttccgtacacataccccagaatcagcacaatttcaattatccttgctatcagggtggccacagccgcacccgacactcccatggcaggcatacccagcttgccgaaaatcagcacatagttcaggcatatattaatcacgattgctatgcagctgcttatgacagggaaaatgaccttgttcaccgccctgagtatggccacatacacattggtcatggccagaaaggggtaggttaataccgctattttcaaatactttgaccccagctccacgctgtcatggctggtggtgaatatgcgcatgacggattgtggggaaacaagggccggcacaacgaagaacaaggcccctgtcagagccagaagtatggaaagccccaggaccttccgtatgctcctcaaatcaccgtttccccagaactgggccgccagcacgccgcttccgctgacaattccgaataccagaagcgaaaaaacaaagaagaacttattggccagtcccactgccgctatggcggtggcccccatggtgccaatcatcagggtatccaccaggtttaccactgtgttgagcattccctgcagagccacgggacaggcaatcatcagcgccttccttaaaaatctgctgtcacgaaacatctccttcgtactctctattaactgcatcatatttctcttccaccgaatctttcccgcggtccgcagccttcccgctttctggcacaggcacgacccggacgctctctatcatcttattgccggcccgctccacttcaaagagccagccgccgaactccacctgggggttctccccttcctgagggatgcggtccagccgtgagaccagatatccattcagggtatcgtaggtgtcgctgtcctcctcaggcagttcaatatccagggtttccatcacatcttccaagggcgtaaggccgctcatgacaaaagtgccatcctccatggcctgtatgaaatcctcttcctcatcgtattcatccatgatgttgcctacgatttcttccagtatgtcctccatggtgagaaggcctgctgtctgtccgtactcatccaccacgatttccatgtgaatcttgcgggactgcatctccttgaaaagggtgtcgatgttccttgtctcaggtataaaattggcttcccttaaaaggccgggaatgtccataaccatcctgtccttgttctcttccttttccgcaaaggtcatggcatcgcgcatgtggagtatgccgatgatatcatctatgtcctctccgtatacagggtaccgggtattcacgccttcattcaggataaaatccactgcctccttaaggctcatgctgccgtccagaaccgtcatgttggtgcggtgcgtcatgatatccgcggcttccttgtctcccagctcaaagatattggttatcatctctgtctcatccgcttccaggacaccctgttcatggccttcattcaccatagacatgatatcttcctctgtcacgttgccgtcgtcatccgccaggtccaccccgaagagcttaagcaccagggaagaaatcaacgtaatcaggcgtgtcaggggcaggaatagccccgcgaaaaagagcaccaccggaagcatatggtatccccacttctcaggctccttggccgccagacgtttaggtatgatgatgccgaagctgataaccagcaccaggacaaatatggtgaccagggccagaatccctgcccactgccaccaggacggattcctgtaccagggcgtgcccgctgccgccatcacctgggccggatctacccaggccagtacctttcccaaaaggaacctgcgctccaccatgccaatcatggcaggaaggatcgccgctcctataatcatacccatcagatgggtggtgacctggatggtatggacgaaccgcacgggacggttcactatctctaacagacgcgcggccttcttattccccccggccgcctcctcttccagcttcccttcgttcacattctgtattgccgaaccaaaaccgtaaaacactgcctccagaagaataaatcctatcaatatgaggatactgacaggtggataaccatcgtccataatgacaaaaagactcctttcatactcatgaaacaccataaccgtcgggccctgccaaaaaaacagagctatacccctaaaatacggcataactctgcttatcatatcatttttctcatatttcgtcaatggtgccttatgctcctgctcttggttcccgctcacgggtcccccgcctgcttatgtacgcagttccaggctaatcataagggcctcatccaccttctgctgaagctcctcgtcaatgtggcagattttctccttcagtctctgcttgtcaatggtgcgcagctgttccaggagaatgaccgaatccttaatcatggcacagcgcctggtgggcagctccacatgggtgggcagcttggctttgttcatcctggatgtaatggccgcacatatgaccgtggggctgtgcttgtttcccacgtcattctggataatcagcacagggcgcactcccccctgttccgaacccaccaccggccgcaaatctgcataataaatatctccacgtctgataatcacatcgttcacactccgtcaatttattcaaccttagtattgacatttttgacctgtgtatacatagccgggatacactggtgcatccggccggctttacgccacactaataacatatgaatcagacgttctctttgagcctggtaggcttttacatatatccaaagccctcgtaaatatcattaaagtaatcctttttcccaatggccttcccgtcccgcaggtagactcttggaacccgtttgccgatttggcagataatctcatagtgaaaaccgccgcttaaggcagctaactcctccaccgtgatgcattcctccccatcccttccaatgagagtcacctggtcgccttcctctgcctccgggatgtctgtgacatctgccataaactggtccatgcatatcctgccaaggatctctgcccgttttccccggataagcaccgctcccttgttggagagactgcgcaggtagccgtccccgtatcccacgggaatggtggccacacgcatgggacggtccgccacaaaggtacccccatagctcacagccgtacccggcccaatggtctttatgtatgtgataaagctcttaagctccatggcaggaaccagcttcaccctgtcccgggccacctcgtctgatgggtacaggccgtaaatagagattccggcgcgcaccatatccagtccgttggagtccagcccctccacaataccggcgctgttggagcagtggcggatcgggatatccaccccacggctgcagagcatttcacagaattccctgtatttcttatactgtgcctcataaaatgccttgtccgcctcgtctgccctggcaaaatgggtaaacataccctcaatgcatattccgggaagcctggatatacgggccgcctcgtctgccgacgcctcatccggcgtcattccaatccggctcatgcccgtatccaccgccagatggatgtttgccctggcgccgttctttacagctgtttcagacaatttccccgcctcctcataccggaacatggcagggcgtatatcgtaccggaccagatcctcaaaacggctctcatgggtcacgcccagtaccagaatcatcttctggatgccgtggcggcgcaggataatcgcctcgtcaatggtggccaccgcgtacccttttacgtaaggatcaatggccctggccaccggaactgccccgtgtccgtacccgtctgtctttaccaccccgatcatggaagcggaaggaggcagactgtccttcattgccctcatattggattccaccgcatccaggtcaatggatgcgtaaactctgctgtaagaattcattgttgttgcctcctgtgtcacgggcctctgttccggcccattttcaatctcattttattatttggcgcggcggaacggatgctgcaccgcagttgtcacaccttggctgtcacgccctggccgtcacaccatgactgtcacaccccagccgcacaccatggccatcacaccccagccgcacaccatgactgtcacaccccagccgcacaccatgaccgtcacaccatggtcatcacactgccaacagcatccgccagttccgaagccagcaggctgtgggcgccgcttttagaggcagccgcgtcccctgcccgtccatgaagatatacacccagacaggccgcctcctcttcctccatgccaatggctatcagacctgctatgatgcctgtgagcacgtcgccggagcctgcctttgccatggcgctgttgccgctggagttgatgtacaggttcccgtcccgtcccgcagtcacagtggcggcgtcctttaacacgcaggtaaggccgtagcggcccgcatactccagggccgtggctgccaggttctccttaatctgatcgattccctcccctgtaagacgggccatttctcccagatggggcgtcacgataatgttctctgtatagtaggaggtaagatatggatgacccgctatggcattcaggccgtcggcgtcaatgatgacaggcacgaacgcgctggtcagtatatcctccaccagatattccacatagggtccgtttcccagtcccggtcccagcaccaccacgtcagcccattccatctgggcttctatcatcttcctgaattcatccctgccctccatgagctggtcaggggtgtaggtggctatgatggcctcaggcaggcgttcctggagaatctgacggttttcctccaccgtaagcagttttaccagtcccgcccctgtcctgtatgcggataaagcgctcaggtaggcggccccgcacatattcttagagcctgccacaatcagcacctttccaaaggttcccttgttggaataggcagggcgcctgggtatccgtttcaaatcatcatcactgtaggtaacggcaaaatctcctgccgccgtcccctctgcttccttcaccgcctccagggcctgtccgggaaatccgatatcagccacctccacccggcccgcgtactcccggcccggatacagggctgtcccggttttctcccatccaaaggtaaccgtcaggtccgcccacagggctatgcccatgacagttcccgtatccccatgaatgccggaaggcacatccaccgccacagtgctgcggatggacttggacgcaagcatttcgatacactgcctgtaatccccctccacagggcggctcagtcccacgccgaacaccgcgtctatgagaaggccgcattcttccttctccccctcctgccacggcagagtgaaaagtcccacgttgcctgcaatcttaagctgcgtcctgaattcctctgttcccttatccggatttcccaccagaaatacacgcaccggatatccttttagatgaagcattctggctgccgccacaccgtcggccccgttgttgccggtgccgcacaccgcccagattacatcccccttttcccacaggcgctccgctgccagggccaccttaagagctgcccgctccatcaggaccagggaggggattcctatggtgtggatggtgtatgcgtcaatggccttcatctgttttcccgttaccagcatcctcatttggctgtacctcctttatccttccttctcccactgcaaacgccatggcgtattcccttgtattggtgatggacacctccagacgctccattcccatctcctgaaaccgcttaagggcccctctgtaaaggcggacatagggttttcccatatcatccctgagcacctccacgtcgatgggcatgaaggtccgaaaccctgtccccaaagccttggcaaccgcttccttcacagcaaaagagccggccagcttagaggcggacccctttgcttgccggctttccatatccgtaaatgtacgcaccacaaaataatcctttttacaggctttttccatgcgtctgatttcaattaaatctgttccaactccaagtatcatggtgctgtcttcctaaacatttactttaacgcgttctttttctcctcctgcaggtcatacatgctgctgacccggtaggaaagacgcatcaggctctcggacaggtgcacattctccaccaccacatcctccggtaccaccaaatccgtatgggcaaaattccagatagccctgattcccgcgtttaccaggcggtccgcaatctccggcgcctttgtcttcgggatggtcagagcagcaatctgaatctcattctccctgataaacgtttccaaatcatccacggagcgaatctcaatccctctgatgaccaggccgatcagtttggggttaatatcaaacattcccctgataacaaagcccctgcgctcaaaattcgtatagttggcaatggcctgtcccaggtttcctgctccgatgatgatcacattgtgctgtctgtcaatcccaagtattttggcgatctctgaatagaggtacttaacattataaccgtagccctgctggccgaatccgccgaaattattcagatcctgacggatctgagacgcggtcactttcattctggcgctcagctcattggaggatatgcgctccacaccttcctctattaattcacctaaataacggtaataacggggcagcctggatatgactgccttcgaaatctccttgcgttccatgatgtatccaccttcccattgtgcaattctgtcaaaaccttaatagttctattataaacacacgtcaaaaaaatgtcaaaccgtttacatatgttcttgaaaaaatcgtctccgtatattatacttgggagagctaaatatgtcgtttttaaaggagtttaccatgattttatcatgcagcaatataagcaaatcatttggagagaaacatatattaaagcaggtttccttccacctggaggaccatgaaaaggcagccattgtcggaatcaacggcgccggcaagtccactctcctcaaaatcatcatcggggaactggcctgtgacgaggggtgcgtggccctgagcaaaggggcctccatcggctacctggcccagcaccaggacctggacagcgagagcaccatccacgacgccctgctggaggtcaagcgccccatccttcagatggaagaacgcatccgctccctggaactggatatgaaaagcgcgtccggcgaaggtttagaaaacatgctggaggaatacagccgcctgacccaccagtttgagctggagggcggttatgcctgccgcagtgaaatcaccggcgtattaaagggccttggctttgccgaggaggaattttcaaagcccatcaacgccctgtccgggggccagaaaacccgcgtatccctgggcaagcttctgctgaccaagcctgacatcctgctccttgacgagcccaccaaccacctggatatggaatccatcgcctggctggagacataccttaagacctacagcggcagcgtaatcatcgttgcccatgaccgctatttcctggaccgggtggtgacaaaaatcgtggagctggacaatggaaccgggaccgtgttcagcggcaattacacggcctacagcgacaaaaaagccatgcttcgggacgccagaatccgggcatacttaaatcagcagcaggaaatcaggcaccaggaggccgtcattgccaagcttaaatcctttaaccgggaaaaatccatccgcagggccgagagccgggaaaagatgctggataaaatcgaccggctggaaaagcccatagacatcgacgactccatggatatccggctggagccggatgtggaaagcggcaaggatgtgcttaccgttaccggcctgagcaagtcctttgacagccagaccctgttcacagacgtaaattttgaaatcaagcgcggggaacgggtggccatcatcggcaacaacggcaccggcaagaccactctccttaaaatcatcaaccagctgctgcccgccgatgccggcgagatacgtctgggctccaaggtgcacatcggctactacgaccaggaacaccaggtccttcatatggataagaccttgtttgacgaaatccaggacacctatcccagcatgaacaatacccagatccgcaacaccctggcgtcctttctctttacaggggatgatgtgttcaagttgatccgcgatttaagcggcggcgagcggggccgggtctccctggccaagctgatgctttccgacgccaatttcctgctccttgacgagcccaccaaccatctggacatcacctccaaggaaatcctggaaagcgccctgtgccgttacaccggaactgtactctatgtatcccacgaccggtatttcatcaaccgcacagccaccagaattctggacttgaccggacagtccctgattaactatatcggcagctatgactattatctggagaaaaaggatgtggtggaagccgcgtttgcagccaggaacagccgtacatccgcagtgtccggttcctcccagtccccggaccggccgtcccagggttccccaaacgacctgaagctggaatggaaagcccagaaggaagaacaggcccgtatacgcaggattcagaacgagctcagaaaaacagaggagtccattcacgccctggagaccagggacagcgagatcgacgccctcctcaccctggaagaggtgtacaccgatgtgccccggcttatggaactgaataaggaaaaagaggaaatagccggacagctggaaaagctgtaccagagctgggaagaattggccgaggaggcctgatgccgcagaaaggagctgttcaatgaaactgaaacgtatatttgccctcttgggggccgtcctgctggcaggactgtttattctggccattgtgctggctgtcatgggcgcgccgaagaattatctcatggcggttatcttctccctggtgttcattcccatcgtaatgtacgccatgggtcttatgaccagggtgctgaaaccatccgatcccccggaaggcatggatgaggacggggatgcaggggatgagctgtgacagcgggaacccggttcactgtataactacaaaacaagctcccttatgaaagacacgtttctctgtctctcatggagggagctttttatatcatggcagaactccgggctgaaccctgggctgaaatccgggctgaaccctgggctgaaatccgggctgaaccccgggccgaatcccgtgctggactccgggctaaattttggtttcagcaggccgcctgttttttcaggctgcttctcaccagcccgtttacccagaacacccccatcatgacaacagacagcagggccgcgccctcatatgggaagcgtatatccgaagctcccgcagtccgggccataaatcccagtaccaggggtgaggaaaactgtcccaggcttctcatgaacatgatgacagagcctgccgccagggactcatccctctcacaggcaatacacgcctccgcgttaaaggttcccactgccgaggcaagggcaattccaaacagaaccagtcccagcatggtcaatgccagactgttcttcgcgtacagggacagcagtcccccaatggagcacagccatatgaaggtgcccatataccttcccaggagtttcttaagctttcctatgtaaagccctgtcaccagggagcttacagtctggaaggacatgatgatccccaccttttccccgctgatcaggccctccgacagaatgatggaggaacagttgttcagtatggcaaaataacctacaaacaccacaaaggttccggccccatagacccatgttttcctgatgacgccaagattccccctggcccggcgcgccctgtcatctcccgctgctcccccggcgccggtgaccgtcacatcaggaatatgcttaaggcacagccacagacatggtattccaaacagatacaccagaaacaccgcccgccaggatatggcagccaggtacccggccagcaccatgcatatgatggatgagacactggaccagatgacaatgccgccatttaagcggtgctgttcctccctggtgaagaaataggacagcagccccactgacaggggcatcatcagcccatatccggctccaatcaggattctggtcaggaccagggtataaattccggaagccagaccgcccataaggccgccggccagaaacaggaccagtcccgcagcgcagagcttccggacagaatagcgtctgctgagccatgcaaagggaatggccacggcaattaccatcagggacggcagggacactatcatctgcaccagcactccgggcgcatccggaaaactctggcgtatgacacccagggcaggcgatatgccagttcctaccagggcattggccatggaaaggctcaggattgcccacagcaccatggacctgtttttcatttctgattctgtttttttcacttctgtcatttctactgctgcattgtctttcgcgctcatacatcctgcctttccagaagatggtacagtgtgttaatatagacagccaaagccggaaccatggcatcctcatcaatatcaaatctgggattatgcagactggcagtcagtcctttctcctcattcttcactccgaagaagaaaaaggcgcctttgtatttcctggtataccaggcaaaatcctctgatcccatctcaggctccggacgcttcatcaccttgtcctgtcccaatacctctgccgcggattggtaaatggtatccgtgatatctctgtcattggcaaaggagggaaacgcaaaggaatcctcaaattcacaggtgatttcgttcatccggcttaagtctcttacaatctgctccagcctgcctgctatatagtccctcacctgaccgtcgtgggcccggtaggttcctccaaaggtcagctctgagggaaggacatttttagtggacagtaccccggcgtttatagagcataccgagataacggctgtcttcatgggcggtatttccctggaacctatattctgtatggcctgaatcatctccatggcaatggatatcaggtccttccccttatggggcgaagccgcatggcacccggttcccttaagctttacctcgaaaaaatcaccgctggcaaaaaagcttccgtacctgcatcccatcacacctgccggatattgaggctggcagtgggctccgaatatggcgtccacgccgtccaacacccctgaatccacgatgagctttgccccgccaggcgcaggaccttcctcggcaggctggaaaatcagtttgacgcatccgccgggaatctggtccctgtgctctgaaagataggatgccagccccagcaaaagggctgtatgtacgtcgtggccgcaggcatggcataccccatccctggcagagcggtaaggcacatccttctcatcctgcatccccagggcatccatatccgccctgaccgctatggtatttcccggcctgcctgtttccaggattcccaggacagcgctttctgcaaatccggtgtgcacctgaaatcccagcttctccagcactcccgccaccatggccgatgtctttggcagatgaaatccggtttcaggacaggaatgtatattccttctccactccaccatcctgtccctgtattcctgcacctcattcagtaacccctgcatcctgtcacacttcctttctcagatccgctcacacatcatcagccaaatatggttttcagccgttcaaggccttccttaagcatggctctctgtgtaccgatattgatacgaaggaatccatttccttctattccatagtgggaaccgtcattgggcgccacacctgcccctaccaccttttccatgagttccttctggcttaatcccagtgccgtaaaacccagccacataagataggttccatcctggacatatgtctttgccgcaggcaggttctccgccacatactctgccacaaactgcgcattttcatataagtactgattcagctcatccacataggctgccccatggcggtaggccacctcaaaggccttaagtccgaacagatccactcccacatgaaacgcggtgaccaccttgttcaccctgctatacagttccggattcttgataatcaggacagaggacttaagaccggcaatattaaaggttttgctgggagccatggcagtgacgctgcgccccgccgcatcctggttcactgtctggtaaggaatatgcttgtgtcccggaaaaaccagatccgagtggatctcgtccgaaaataccagaacatggtagcggctgcacaaatcattgagtctggtcagctcctccatggtccacacacggcccaccgggttatgggggctgcaaaggatgaagagcttaaccccctccttgaatttctcctccatgtcctcaaaatccatttcataccgtccatgttcaagcttcagggatgaggtcaccagggtcctctcctgctgctcaatcaccttaaaaaacgggtcgtaaacaggcgtgtttaccatcaccttgtcccctttttccgtcagtgcatagatgatgaaggaacatgcgcagacaacgcctggaatagtaatcagctcctccctctttatgtcaaagtgattgcgcgttctgttccattcaataaagctctcgtagtacccctccgacgggaacgtatacccataggtcggatgctttgccctctccgtcatggcccgggtgatctccggcagtgtctcaaagtccatgtccgcgattccaaagggaatcagatccttccggccaaaatctttttccagccggtcccacttaattacctccgtattatgtctgtcaaatgtcctgtcgaaatcatacatgtttccttaccaacctttcttagttacttatcatttattgggacgcatacccgcaggatgcgtcccgcctgatggtatctatcataccctcaggccccctctcttgtctaccccatcataagcagcaggttacacatgcccaggcccacaaaggttccaatcatggagccgatagctgccatgataacggagatagactgataggatttaccataagcagccgcaaccaccggtgccgacgacacgccgccgatattggcgatgcttgcaattcccagtgtacacaaatctaccttcataagctttgccaccaggaacatgatgattacatgtatcagaagcacagtcacgccggacaggaagaatacgcctgcattggcaaagctccttaagtccacattggaggatgatacggaaagggcaaagatagccagcgttcctcctatcagctccagaccgtttatatagccgaattccgtggtggtgccgatgatgacgccgatggctgtcaccataagatacagccatacctgggcgggcactgcgggtatcagcgctcctaaaaagtcgcccatatggaagccgaacgccacaatcacaaggcccacacccataatcatgaacagatccagagaagtaggaatctgcttttccctctttgtctcatcaagccttgaggcaatcacatctatttcctcgggttttccgcctgtccacttattaaacctggcggcaaagggaaccatgacaatcaatatggtcatccagggacggaatatcaggttaatcagcagcagtacattggccaggttctcatcgctcagccccactgccccggcaaccgcgtacaggttttcaatgcctcccgtaaagctggcggtccatgtgccgaaggactggggaatctgctgcagtcccagaggaccggcaaagcacttatataccaccaccatgccaatgcagatactcagggtggtgcacaggaatacggccagcagcttgggacctatctttaccatcttcttgaaatcacactgcaccgcgatacagaataccatgaagggaaccatgtattccaggatattgctcctcatggagctgacggccttattgctgaaagaccatacaccaaaggtattgcagcacacaacgatcaggaatacaataatgaccggcggcaggaacttataaatctttaaggggtacttctttacaatccagaacacaaatgcattaatggccaataatgctgctacaaaacttaatcctgatgttactaacatatacttccctcctgtgattcataatgatgtacggtcaaacagctttccccttgattatattttaatattaaaactgtttaacctttaaactatttacaataagaagtatactatatttttcgccatatttcaacatatttttatgcaaatttatatcaactcgcggatatttgtttccttgattccgtcatattatatatatttgttatgcaggctgtcgcatcagacccgtgccggacctgaaccagacagatgcgttcattgatgcgggaaatgatccattcatataatgagataatataatgagaattaagttatgccaaaaaggaaaagccggcagttttgtgccggcctggagatatgttaattatgattataaagatgctatttgttcaaatactctatttacatccggttctccatacccccaggtttgggataagcgttaaaacagaaccgtaacccatgtaggaggggtgccattccaggtgccatgaatatgtgtcgaaattaggttgaaatctttcctgtttttccttatactaataggagtacagttttatcattaaataaccgggggaattatggaaaaaaagaatcaaatccaggaaaccatatcattaatcatgaaatataaccgtcagatgtatgagtacggcaaggacttccgcagctacggtaccgataagatgcttcgcgtggaccaaatgtccatcataaacctgattggtgacaatcccaagtgcaatctgaagctcatcgcccagtccactgactccaacatctccaccgtatcccttcaggtggcgcgccttgtaaagctgggcctgctggaaaagcaccgttccagcatgaaccagagagaaatcgtcctgagcctcagcggcgagggcatgaaggcctatgaattccacaagaaactggaccagaactggtctgacaccgtggagtccctgctctcagggtatacaaaagaagaactggccgtcatcaacgcctttctccaccagcttctgaccgagaatcctcccatgtagggggatgttgacagaatcatgaggccattgacagaatttcaaaacaggacccatcagctgctgcctaagggtcctgttttctatatttccttattctatttacgcataatgatgtcgtctcttcccggtccgttggacaccattgagatgggagcctcgatttccttctccacaaactcaatgtatttacggcagttctccggaagatccccgtacttcctgatgccgcggatatcacacttccagcccggcagtctggtaagaaccggtttggccttctcaagcttagccgtggtagggaattccctggtaacctgtccgtcaatctcatatcctacgcataccggtatctcatccaaataccccagcacatccagtacagtaaaagccacttccgtggtgccctgaatccggcagccgtacctggtagccactgcgtcaaaccagcccacgcgtctgggccttcctgtggtggcgccgtactctccgccgtcgcctccccggtttctaagctcatctgcctcgtctccaaatatctcactgacaaaggctcctgcgccaaccgcactggaatatgccttaaccacagtggtaatatccttaatctcataaggaggaatgcctgcgccgatggctccataggcagccagtgtggaggaggatgttaccatggggtagatgccgtggtccgggtccttaagggagcccagctggccctctaacagaattttctttccctccttaatggcctcatggagataagcggaggtatcacatacatacggctcaaccatatcccggtaactcaggagctcctttatgatttcttcaggatccagaagaggtttatggtacagatgctccagaattacatttttcagttcgcataccctgtatgccttttccctcagcagctcctggtcaaagagctcgctgacctggaaaccaattttggcatatttatccgaataaaagggagcgatacctgatttggtggaaccaaaggactttccggccagacgcgcttcctcgtaggtgtcaaacagcacatggtacggcatgagaatctgggccctgtccgaaaccagaatcctgggctttggcacgccccgctccaccagcgactcaatttcctgaaccagataaggaatattgagagccacaccattgccgatgatgctggtggtatgctggtaaaacacgccggatggaagaaggtgaagggcaaacttgccgtaatcattgataatggtatggcctgcattacttccgccctggaaacggatgataatgtcagactccttggcaagcatatccgtaatcttaccctttccttcgtcaccccagttagcacctacaattgctctaaccatactaaaatcctccttcgggtatctcccgttcaatgctcatttgcagttcatgaaaggatggacacgcattcctgtgtatcttatccttacctaatttactacaacctataccataagtaaagacgttatttattatgttttccataagtattgcttatgtcctttttctgaagaaggctcattttctattatctgccgccggccggctgctcagccgccgcctgatcgcaggccatcatatctaacagcctgcgccccggcacggaaatcaggctggactctcccgttaccacgcacatgtgccggagaggcatctcttgtttgaatttgagccggaatacctcgcctctcattatggcatcctccgcaaatccctccatgacgcacccgatccccatgttgcgcctggcaaactgcacaatcatatcgctgatggccagctcaaattccggcttaagcagtgttccctgctgtgccagaaaggcgtccataaaggttctggtgcttgtgttcttttccagcgctatacacggaaaggcttccagctccttgtactccagcttgcgcccttccaattcccggaagctgctgcccgctatgaaaacattgcgtatggccttgacctgaaactgtctgacagtccctctgctggtaaagggggaggtcacgactccaaaatcaattctgccctcttccaggcttttgatggtttccggggtgggcgcattggtaacattcaccttaatcttgggatattcccggtggaactgttccagataaggaagaagataaaactgcagcgtcatatcgctggctccaatccgcacttcccccacatccatattcagcatccgctccagcatcttcccgccttccagcagctcctccactccaggctttacatagtggtatagaagctccccttcccgggtcagctgcacacctttggaagtgcggaagaacagctttgtcccggcttccttttccaactgccgcacagcctggcttacagccggctgggagatacacagctcctgggcggcagctgtaagactgccgtgggcgcacacatggtaaaatactttatagtattcaaagttcacattcatccataagtactccttatcgaaagataatatattcagaattaattattatggatatcatagcacaaaacagaagaaatgtgaatctgaaacagcgccggcaacccctaaaacaaatttgctccccacagatgcagtatctatggagagcagtcaaacatactatatgaacttacgtatacccaatcactgaatacatcacggccggaccattttacgaaacatctgctcccgtacccgaaaaggcagaccaggaacataacaggccggtgatatgcgcagagaaaatcatccaaatcaatataataaagtatctgataactatcaggtggtacctcccacaaccttaacttgaaactggatactggctgttccaagggatgctatattgggaatagtgtatgtcagcgtattactggtaaccgttggtgtggcggcagcgccattcacagtaaatgaacctgccacaaaggtggcgcccgccggaattgtatccgtgaacggcaagtttgtcaaagcgttcagtcccacatttgtcactgtaaccgtataagttaaggtatcgccaatactggcggtaagcttgtctaccgctttaagcagcgttggcgcgagaagcaaaaccgttgaaacagtattgctgttgataggattaccgccatatgttacgctggcagtattatcaagcttatttattagagccacgtttcctcaccccgcttattatgattttaatacatcatatgtaagcgggaacagagtgttcctaatatatcagacattaatctgcgctgtcaacccaagctctccctcattctcctcaagaagcggcttaataacctcttccagaaattcctccacctgctttggtgaacggcccacataacgggacggatccatggtctttttcagttcatccagggaaagattgaaggcagggtcagctgctatcagctccaggaggttgttatccaggcccttttccttcacatttcttcccgcctccatggacagctcgcgaatccgctcatggagttcctgacggtcgcctcctgcctttaccgcgtccatcataatattctctgtggccataaagggaagctccgccatcaggtgcttttcaatgaccttgggatataccaccaggccgtccaccacgttcaggtacaggtccaggataccgtccactgccagaaaaccttccggtacggaaagtctcttgttggctgagtcgtccagggttctctcaaaccactgggtggacgccaccagcatgggattcatcatatcgctcatcacatagttggccagggaggcaatgcgctcgctgcgcatgggattcctcttatatgccatggcggatgaaccgatttgcttcttctcaaagggctcctccacttccttcaggtgctggagaagacggatgtcattggaaaacttgtgggcgctctgggcaatccctgccaggacacttataacacggctgtccaccttccgggaatacgtctggcctgatacaggatagcagccctcaaatcccatcttctctgcaatccttgcatccagacggcggcatttctcatgatctccgtcaaaaagctccaggaagctggcctgggtgccggtggttcccttggaacccagaaggcgcatggagccgataaggtaatccaggtcatccaggtccagcttaagctccatcatccacagggtggcgcgtttaccaaccgtggttggctgggccggctggaagtgggtgaacgcaagtgtgggcagatccttgtatttttcagcgaacccggacagctccgccagcacgttgagcagtttcttcctcaccagcttcagggcctcagtcatgatgataatatccgtattatctcccacgtaacaggaggtagcacccagatgaatgattccctttgccttagggcactgtacaccgtaggcatagacatggctcatgacatcatggcggacttccttctccctggccttagccacatcataattgatatcctctgaatgggccttcagttcctctatctgctcgtccgtgatggaaagccccagctccttctctgtctcagccagcgcaatccagagctttctccaggtacaaaacttcatatcaggcgagaagatgtactgcatctccctgctggcatagcgctcggaaagagggcttacgtatctgtcgtggtcactcatgtcatatcctccgtattcattgatttcatgttttctatcatatcatatacaattgcttttttaaatgcccgggcctatttctcataacttccccggatgtccccggaaggcggctccatagggtaatcccctgtaaaacatgcggtgcagacaggcctttcagatgccatctgggaaagccgctcctgtcttaaaaaggaaagggtgtccgccccaatgatttgcctcacttcatccacagtccttccatgggcaatgagctggtcctccgacggaatatccgttccaaaataacaggggtgtaaaaacggcggagcactgatcctcacatggacctccctggcacccgcatcccgcagcatcttcacaatcagagcgctggtggttccacggacaatggaatcatctatcataatgactctctttccgctcaccgcctccttcagcacattgagtttgatgcgtacagcagactccctgctgctctgctttggcttgataaaagtccttcccacataggaattcttcacaaaagcagttccgtatggaatcccggattccatggcatagcccagagccgccgcgttgccggattcaggcactcccaccaccaggtctgcctccaccggtgaatccgctgccaggaaccggccggcctgaatcctggccttataaacgctgactccgtcaaaaacactgtccggtctggcaaaataaatatactcaaagatacatctggcttctccggaagggtcggacaggcacatccccttatcggaggaaatgccgtctttcgtgatggtcacgatttcccccggatccacatcccggacaaattcagccccaatggtctccagggcacatgtctctgatgccaggatgtaggcattatcccgtttgccgatacacaggggcttgaaccccatgggatcccttgctccaatcagcttgcggggactcattattaccagggagtaggctcccttaagcttcttcatggctgcggccaccgcgctctccacattatgggtatgaatcctggccctggctatgtggtaggcaataacctccgagtcaatggtagtctggaaaatagcccctgtgtactccagctcatggcgcagctcaggcgcattgaccaggttgccgttgtgggccagccccaggattccttttacataattaagcaccaacggctgtgcattttcccttgtgctgctgccggccgtggaataccgcacatggcctactcctatattgccccttaatccttccagcacctccggtgtaaatacctcgttgcaaaggcccatccccttatggaccgccgccttccccttgggcccttctgtgtcgctcaccgctataccgcagctttcctgtccccggtgctgcagggcaaaaagcccatagtatatggtccggaccacatcgttcccatcaaaatcatacatcccgaaaaccccgcactcctcacgcagtttatccgccccaatatcaaaatccatcaggttctgattcatgaagtcatgtcctttctgtgtgtcaggctgccagtttcataccgctctgtactgataacaacgcggtgctgattatagcttcccttctcaaagaagggaacgcctgggtaatcatgcccaggcgttgtatcttaatttgtccgcgtcaaaccttccggtccggtttactggatacccagtctgcggaatacttcttcgtatgcatcctctacattgcccaggtctcttctgaatctgtccttgtccagcttctcatgggtatccttatcccagagacggcatgtatcaggagaaatctcgtcagccaggataaccttgccgtgatagcggccaaactctatcttgaaatcaatcaggtcaatgttcagtccgccaaaatattcctgcagcacttcgtttactttaaacgcatattcggtgatatcgtcaatctcttcctgggtggcaagtcccagagccagcgcgtaatagctgttgataaacgggtcgcccaggtcgtcgttcttatagctgaattccagagtcgggcatttgaacttgatgccttcctccattcccattttcttggcaaagctgcccgcagagtagttgcggatgattacctccaaaggtacaatctccactttcttcacagcggtttccctgtcatttaattcttctaccaggtgggtaggtacccccttctcctccagcttcttgaaaatgaagttggtcatacggttgttgatggcgccctttccaacaatggttccctttttaagaccgttgaatgcggttgcatcatccttgtaggacacgattaacacgtccgggtcctccgttgtgtaaaccttcttagcctttccttcgtagagcatctctttcttttccatgggtatccacctgtccttttcttatattcgtatggttgcgatatagatttataagctgacgctataaaagaataccatttcagaagaaattataatacacaatgtccttgaatacaagcatggcaatcattaaaattcctaatgaatgtcctctgtcccgctaatcactccctgaatctatggctgtctcacggtcctcatacccttcctccacctggaatatgtggattttcttttcatccagacgaatggtaaatccccgcttcactgatgtcatgccatcctggtccgcagccctgaccggaccgctctcctcaatccgttccatatacggtatctgctcccggacccaggatatcatgccccggccggttttagcccaggccatggtaccggcagccagaaggaacaggactcctctaatgagacgctttctgcgcctgacagacgggcagctttcccgccagaatcttactgccctgcggcgcatctttctcaggcggcgcatacgcctgcttatgtactccaatcaatctccttccccgtctgtccatgaactgattataatactttacagggtgctcttcaagatccatctcctggtttttacgcagatggaccctctccagccgtccttggcatagaaagggtccatattcaggctttgacagcaatttactatctggcctctgttgtattgttggtgccgctctcattgaccgtgttggattcgcctgtaatatcatccacgccgtccttaacgtcatttgcgcccttctccacgtcattcataagtccgtcaatgatgccgtccccttccgtttccatggaagatgtctccatccctgttgtttcctgggatgaggtactggtggatgtggctgctgaggatgaattctggctggcacctgttgaggactgtgtattggagttattgcttccgcaggccgtaacagacataaccatgatgagcagcagcattgcaaaaattgcaggtctgatttttttcataatagcattctcctttcgttttctacctatattatgtgcgttaggagaatggattatggtggaacttcctgccttttctggaaaaatctgttataaatccaccacgtccgtcatggagtacatgcccggcttcttaccggccaggaatttggctgcctccagggcgcctttggcgaaaatagccttggaatatgcggtgtggcttaaggtaagcacctcgtccctgcccgcaaatattacgtcgtgctcgcccacgatggaaccgcctctgacagacgaaattccgatttctttgggatttctcttttcccgtctggtactcctgtcacaggtataggcatactgcccgtccatggcctggttcatggaatctgccagggccagggctgtgccgctgggcgcgtccactttctggttgtggtgcttttccacgatttccatgtcaaaaccggatcctgccagtatcctggccgcgtcacttaccagtttgagcagcaggtttactcccagggacatgttggcagaacgcaggattgccgtcacctggctggccttttccactgccgcaagctgctccccggagagcccggtggtacagaggaccacgggaacctgctctctgcagctgtaagccagaagcccgtccactgcctttggagacgcaaaatctacaatcacgtccgcctccacactgcactggtccagggacgggaacacgggatatcctaaatccgttccctcccgtacatcaatacctgccacaatccggatctccccgtcttctgccgccagtcccgtaattacatgtcccatggccccgcagcagccgtgcattatcatctttaccattggtataccgtcctttcccggaatcttccctacaggatgccgtaagctgtcatggccttcttaagcttctcctgattctggggctccatctcagtcaaaggcatgcgcagaggtcccactcccttgcccatcatgttcatagccgcctttacaggaatggggtttacctcgctaaaaagctctgtaatcagcggaatggcctttaactgaagggcggcgctggtcttaacatcccccgcaaagtaggaagcgcagatgtcgtgggtctggcgtggagccacattggacagcacggagataacacccttgcctcccagagagagaaggggcacaatctggtcatcgttgcctgagtacaaatccaccttgccgtcagacaggctcataagagtggcaatggctgaaaagttgccgctggcctcctttacacccacaatattatccacgtccctgcacagggccgcaatggtctcaggcttaatggtgacgcctgtcctgcccggtatattatagaggataacgggaatctttacagcgtccgcaacagccgtaaaatgggccataagtcccttctgggtagccttgttataatatggagacaccagaagaagcccgtccgcccctcttttttctgcctctgcagagagatagacagctgtctccgtacagtttgagccggttcctgcaaccacaggaatccgtttctttgtcaccctgcagatgtactcaatcacatccagatgttcttcatgggtcatggtggaggcttcgcctgtggtaccgcaggcaatgatggcgtctgtgcctcctgcaatctgctcttctacgatctcctccagtttttcgtaattcacttcaccgttttccttaaacggggtcaccagtgctacacctgctccttcaaaaagtgccatactatattctctccttttttcctgattcaatcacagtgtgcttttccccatagaaaatgaaacccggacgtactttccctggaaacaaaaaagggctgaggtaaatgtcagcccttccatatacgtatgattccagtgtctaatccacgttctttggtagctctccatccacccggatgacagtcatacggctcttaaccatatgcccagagggggcgtgaacacggaacgcttcctcttcggcgtttctccctttccctaagccatcacctgtgcctgccacatccggcttatctactcatgatcaacgcaacctctactctatgattgttggtattatattatcaccctgccaacagtctgtcaacaggaaatcactcatatcttgtctgaatccttgtgacctcatccacatggccgttcaggcaatccggatatatggtccctgtgaggatcagctgtatctgcgcgttcctggcctgggctatgatggcgcacagctcctcgcctgatatcactccctcgtccaggattcccagaatctcatccaggataagcacatcacactcccctgtcaccagaaccttcctggcaaaattcaggccgttcaggatacagattcttgcctctgccttctcctcttccgtcagccggtcaaagaaaacaggtgtcttctcaaatctgaaaattttaaattccggttccagacgctgtatgatttccatgttatctacatccagggcgcccttaaggaactgtaccatatagacacactttcccttggtcagcgcggttaatccccttccaatggcactggtggtcttaccgcgtcccggtccacagataacctgtatcatgctctctttcatcatcttgcacctcatgctttacttgctttttcttaagaacaattggacttgctcataatagcatagtttagccaatattgcaaatatttcttacatttttcgaaagatattcaaaaggaatcgttagatgacagcgtctgaagcttcttctgttcaagcctcgtcacattccagcttgctgatggagacctcatatgcaatgcgcttctcgcactctgtctcactgagcttcttggtgtactcgcggctctgcacacggccccaaacccttaccctggtgcctacctcgaagctggaagcaaaacgcgcgttgcgtccccagctgatgcagggtatgtaatcggatttgccgtaggggcggttcacagccagaagaatatctgcgatttcccgtccgagaggagtctttctgtatattggcggcttgcagatataaccgtccaggaatatctgattggtcttggtgtaatccgtgaattcctcgataaaatggatttcccttacaaagatggacagcatcagccggtttttgattccctcatgccggttgtaggagcggaactggcctatgcactccacggtgctgcctgaatagtctttatgtacgtctataaggcgctcggatatcatcaggggaatgatgtccgcctgctcgctgagtctgttgacagccacatccaccatataaaatccttctccgaagacttcatggctgaaggtaaatcccgacacgatttctccgataacgcttaccctgttgttttcaatcattttttctgacatagtacatctcctcttcgcttctaaaatatttctcattctgccgttttacttgtttcatccttttattctcttgcttttgtacggcacattgatagtttatgaggggaaatgccataatagaacaaaaaataaggcgaatcccgccagaatcgttcgacaggattcgccatttcgcttacaaaatgtcgttttttgtttatttattcttaaatgaggccctttttctcagggttggatccagaatctttttgcggatgcgcaggctctccggagtcacctccaaaagctcatccgtatcaatgaagtccagtgcctgctccaggctcatgattttaggcggcgtcagcttaagtgcctcgtcagcgctggaggaacgggtgttggtcagcttctttgtcttgcagacattgatttcaatgtcctctgccttaggactctggcccactaccatgccggaatacaccttgacgcccggtccgataaacagggtgcctctttcctgggcattgaaaaggccgtaggtaatggcctcgcccgcctcaaaggcaatgagggagccggtctggcggtagaacagatcgcccttgtactctgagtagccgtcaaaaatggtgttcaggataccatttccctttgtatccgtcataaagtcgccgcggtaaccgatcagtcctctggaggggatggaaaattccagcctggaataaccgccggctgcctggctcatgccctgaagggcgcccttacggctggtcagcttctggataacaacgcctgtgtattcctcaggcacatccacataggccagctccatgggctcaagcttgcggtttctctcatcgtacttatagagtacctctgccttgctgacagcaaactcaaagccctcacggcgcatgttttcaatcagaaccgacaggtgaagctcaccgcggcccgacaccttgaagcagtccgcggaatctgtctcctccacccgcaggctcacgtccgtgttcagctccctgaacaggcggtcacgcagatggcgggaggtgatatatttgccctcctggcctgccagcgggctgtcattgaccataaaatacatggcaatggtgggttcggatatcttctggaacggaatagattccgggttattaggggtacagatggtatcgccgatatggatgtctgcaataccggagatggcaacgatggaaccaattcccgcctcctgcacctccactctcttaagaccgtcaaactcatagagctttcctatcttgattttcttaaacttatccggctcatgatggtttaccagaacacattcctggttcaccttaagtcccccgttgtccacacgtccgatgccgatacggccaacgaactcgttgtagtcaatggtgcttatgagcacctgggtctccgcgtccggatctccctccggtgccgggatatggtttataatggtttcaaacaggggactcatgtccgcttccggatcctcaatcttgtattttgcgaatccgcccctggcagatgcgtagataaaggggcagtccaactgctcatccgttgcgtccaggtccatcataagctccagcgtctcgtctatgacatcccccggtctggcctcaggcctgtcaatcttgttgatgcatacgatgacggacaggttcagatccagcgccttctgaagcacgaacttagtctggggcatggggccctcataggcgtccactaccagtacaacgccgtccaccatcttgagcacacgctccacctcgccgccgaaatcagcgtgtcctggtgtgtcgatgatgttaatttttgtgtctttataaaatacagccgtgttcttggacaggatggtgattcctctctcacgctccaggtcattggagtccataacacgctcctgtacctcctggtttacgcggaacacgccgctctgcctcaatagctggtctactaatgtggtcttaccatggtctacatgggcaatgatagcgatatttcttacatcttctcttttcatcttcatagtgattactcttccttattatatacgtctacagccacggttttatagtatagcattggtgtgttgagattgcaaggtattttacaccatttccgctgattcccgctgtttttccctgtcacggcgccttatttggccggctcaaacacctctgctatttccttcatgtgctgtacaatgggcagatgctgggggcatatggcctcacatctgcggcagccgatgcagtccccggctttcccgtatctgcccccataattctggtagtagcccctggaattggatttttccccaaagaggctgtactggttgtaaagagagaaatactttggtatgggaatctgcttcggacatccctccacacagtactggcatgatgtacaggcaatggctgtggcggactggatgatttctgccgctctggccacaatgccttcctcctcctcggtcaggggaacaaagtcctgcatataggctgtgttgtccagaagctggctgtaatcagacatgcctgacagcaccatgatgacgccctcgcggctggcggcaaaacggacggcccaggatgcaggcgtcatgccgggagcatgtgcctccatcagcttttcggcctccaggggcacatccgccagggttccgcccttgaccggctccatgacaatgacatccttcccgtatctgcggcacacctcgtagcactggcgggactggatattggggctgtcccagtctatgtaatttaactgcagctgcacaaaatccagctcagggtgttttgaaagaatctcctccagaagctcagcatccgcatggaaggaaaatccgattctgcgggcctttccctcctcctttttcctgcggacaaaggcaaacgcccccagacgctcagctgtttcataatatgacctggacatattgtggagcatgtagtagtcaaaataggaaacaccgcacttttcaagctgttcctggaaaaaccgctccatgtccgcctcctctttcaggtggctgaggggcagcttatccgccaaaacatatctgtctctgggccagcgatccaccagggccttttttaccgctctctcgctctcgtatttgtggtacatgtaggcagtgtcaaaataggtaaatcccctttccataaaggtatccaccatcttgcagacctgctccaggtccactgacgccggatcctcctgatttaacacgggcagcctcatggttccaaatcccagctttttcattttaatctccatctccattatcacattcctcctgtttttttactaaacacaattcctcttaaaacaccaccaggccgctgtcgccaagaccgtagtatacctcgccctctctccggataacagcctttcctgcggtcccttctataatctgggccgtgaatcttccctcctctgccatgggaaccaggaaggtgaacacggctttatccgtatactgggtgtccagggtgtcgatcccgccctgggccgcaatgtactgaatctttcccacgccgttgtaatccgtggtgatgttcagacggacagccagtcttttctccaggataacgcagtttttcaatccttccttgacagccccggaatatgcccgcaccagtccccctgtgcccagcagggtacctccgaagtaccgggttacaacggcacacacatcgtggagctccgcccctgccagcacatccatcatgggttttccggctgtctgggacggctccccgtcgtcgctgcaccgggcggtctgccccctgtccccgatgatataagcaaaacagtggtgccttgcatcccagtatttctttctgatttcctctataaaatccagggcctcctcctctgaggataccgggcacaggtccgctatgaagcgcgacttcttctccaccagctctcctgagcctcccttgtacagaattttataactatctaccacttttacggctcctttacggttatttgtgggttaccatccccacctttcgacattttttacctattttttatcataatatagatatcaggcgatggcaagggcatatttaaaccttttcaattttacaaaactggtgtataatctacaggataggtatgagggtccgcaggggggcggatttcattcagattatgtacgaaaaggagaatctatgaactatggaaagtacgaggctgagcgcaggcttaagtctctccactctaaatcgggcaaatacgcttcacggctgctccttaatatatttaaggcgctatttgtcctgtttttatttctggcagtagtgggtgcatccatcggtttcggtatggttaaaggcattatagataatgccccttccgttgatattctaaatattcagcccagccgttttgccactgcggtatacgactctgccggaaacctgacagataccctggtcaccagcggctccaaccgtgaggaagccacctacgaggaacttccaaaggatttgatcaacgcattcgtatccattgaggattcccgtttctggagccacaacggaatcgacatccgttccattgccagggccgtaaagggcattgtcagcgatgactatgcgggcggcggaagcaccataacacagcagctcatcaagaacaacgtgttctccggaggtatggaatccggctggggggccaggattgagcgaaaactgcaggagcagtaccttgccgttcagctggaaaagaattcaggcatgagcaaggaagatacaaagaagctgattatcaccaactatctcaataccatcaacctgggcaacaacaccctgggagtaaaggtggcggccaaacgctatttcaataaggacgtttccgacctgaccctctccgagtgtactgtgcttgcatccatcaccaagaatccctccagactcaatcccatatcaggacgcgaaaacaatgcggaacgcaggagaatcgtactccagtatatgtatgagcagggttatatcaccaaggcccagcaggaggaagccctggccgatgatgtatacgacaggatacagaacgtggatacagccgccaaggggactaacagccattacagctattttacggacgaactcattgagcaggtcatcagtgccctgatggaaaagctggattacacggaaagtcaggccagcaatcttctttactccggcgggcttcagatttataccacccaggatccggccctgcaggccattgtggacgaggagatcaataacccggacaactattctgttgccaagtattctgtggagtacaggctttccatcactcacgcagacggcaccacggagcattattcagaagaaaacctgcgcaccttccgcaagagcgtgctgggagattcctcctttgagggactctacgcctccaaggaagcggtccaggacgacattgaccagtataaggcatggcttttaaaggatggcgatgaaatcatcggagagcgccagaacctgattttacagccccaggcttcctttgttctcttagaccagcacacaggcgaggtcaaggcactgtgcggcggccgcggtgaaaagacggccagccttaccttaaaccgcgccagcaacgtataccgccagccgggctccgcctttaaggtaatcactgcttttgcccctgccctggacgcatgcggcgctaccctgggcacggtttactacgacgcgccttataccataggaacgaaaaccttcaggaactggtggaattccggctatggctttaccggttactccagcatccgggacggcatcatctactccatgaacattgtggctgtgcgctgccttatggagacagtcacgcctcagctgggcgtggagtacgcagaaaacatgggcattacctcccttacaaaggacgacctgggagcagccactgccctgggcggcatcacaaagggcgtttccaacctggagctgaccacggcctacgcctccattgccaacggcggcgtttacacaaagccacgattcttcaccaagatactggaccacaacggaaaggtactcatagacaatgaaccggagacaaagcaggtgttaaaggattccactgccttccttttgacggacgccatgtccgaatccatgaagagcaaccgcaaattcacccgcccgggcgtgtccatcaactccaccagcacccgggctgccctgacaggcatgactgcggccggcaagagcggcaccaccacctccaacaacgatgtatggttcgtgggctacacgccttattataccgccggcatatggggcggatgtgacaacaaccagaagcttaagcacggaggcgtgaataacggcggcaccaccttccacaaggacatctggcgcaacatcatgaaccgggtccatgagggcttgtcagacccgggatttgcagtgccggacagcattgagaccgcggaaatctgccgcaaatccggcaagagagctgtctccggtgtctgcaaccacgaccccagagggaatgcggtctataccgaatattttgcaaagggaaccgctcccacggaagtctgcgacaagcatgtggaggttaccgtatgcgcggagtcaggcatgcgccccactccctactgccccactaagactaccagggtatgcatgacgctgccggagggcgaggagggagccacggacgattccgtatttgccatcccgggctactgcaccatccactccgacgtttccactatcattccgccaaacaccggcgattccgataatacagggcctaccgtgacacctatcggtccgggataccagtccccgcaggaatccacggaagggtttggtccggggaaccggccttactagaaatagatttaactgatttcaaaaaccagtattagcagaaataacagacagaattagcaggcggatataaaggaatgaaaaaaccggaatccacgttgtcatatgacaggtgtgttccggttttttgttgttttgttgctgctttttattttgctgacgcccttattctgctgacgccctttattctgctgacgccctttataccgccgttaccttcatttcattcatgcttacctgtgaatgtccgagacaaaatggtatgtttatccgaacaaaaacaatcctatttaaatagggtcttgtgaacacgaatcttatcatgaagaacaatagtattcagtctttcttccatatttagtaacagaaaaggcttagttaatacggccaatctgtcaataagcaaattccatcatgtggtttagaagcccagaattcgtttttgggcttttcttcttttcccttcttataaactttcgccgttttgggaattggctctatatcagtaaattgtgctaagatagtattgcgcttgattatgtagtttccattgttgtattcagcttcatatccaagaatacgatttgtaatcctcatttctatatccgcctcactgttctgtcttatcttcatctaccagtagtaactctttatgattgtgtctcaatcgctttacattcacatatattttcatctgttaaaagctgtatcaggttcattgctcctgtttttgaaaatttcttgcccaatataggttcatgactaaatattggatttttatcgtcccaactgacaaaatactctccgttacgattctttactttatatgtttccatgttttttcctcttataatcttcttcatttgactctgtagccagttttagtttcttttttataatctctaccctcttaatcttccaagctgaatacagccattctggtgcgtctgtgaccatgttgttatgataagattacgttgttgctacatccagtccaatccatacgcggatagcatcacataaatcatagaattcttttaaatgactatttaagatagcttcctcatcattgtaaatcagaccaggatcttctatatccgggcatgacatctggatatcttctattaatgcatcaatatcatatttccatttatctatatcctgttggaccattttatttaacagtaattttaaacagacttccatttggttgtatacagacacaattgtttcaatcgtattttccttattaatcaggcttcttagcttctgtccttcgtcttcaagcttatatttccatctaatcataatttctcctttattcgttcttatgtattccaagattatttattataggaaacattgacatgttcaaagacatatttccaccatatttcaggttgtttttggctattatagtcatcccgtaattgttgtaattcttctggtgtcaaacattcctgtagataaacactacatttttttatttcattttcattctccatattttctgcgccaaatatgtttccactaaatcttgccattgttttgtctcctattttaagtctgtcatctataaagcaaaggctttagaataaaatatcttcaagataatccatttctaggcctagctgttccaatacaatgttttcagcttcatcaacatcataattacactcttccagcatgttttttacttcatccagacgtgcctctgcttctttttctgtattcccatcacgtttcattaggatttcgatgattcgattcatctttatcctccttactttccaactatgttaacctagtcgtttatatcttcttccgtttcttcttcaatcatctttttatatttttcataattttcctcagttactttgataataaagaaactcctatcaaaatgtcctgtatcgcaagatttaggagtatatagatatacacccttttctatttttttaatctttggtgtttttctgcagtccgaaagagcatctccaatatcgtgaacaatttctgtttttgaatggaaacagcatttttcactatcaaaaacagaaaaccatacctcactcatccctattcctatccaatttcctattttcaattcctgtttcattttcatttcctttgctttggattttcaaaaacaaaaagaccataggaactttat

SEQ ID NO: 3420 - DNA, 2846 bp, Unknown
  gut microbiota DNA sequence
tcctttgctttggattttcaaaaacaaaaagaccataggaactttatcctacagtcttctctctgcttctttttgtccattttataccgcacatttggcttgttttatctcggacattcacattaccagattcattttcatcacttcatcttcggcttaaacacaagggatgccagataaccgaataccaatgcgccgcatattcccgcggaactggccgttaatccgcccttaaagatacccagaagcccgtcctctccgattccctcctttacgcctttccagagggtgtttccaaagcccagaagaggcacggtggctcctgcccctgcccatttggcaaagggctcatagagccctatggctcccagtatggcaccgctgaccaccagggtgaccatgacccgccccggcatcatctttgttttttccagcagtatctgcaccagggcgcagatgattcctcccacgataaacgcttttaaatagtccatgtcatttcctccttaactgtctatatgttcaatgacgactgcatgggcaatgcccggtatgctctgtccttcattgaagctgaccgaggacagcagggcacctgtggggacaaataaaacccgcttccatgtgccgtcctgtaccttggggaggatgtaggagcaaagggtgacagcggaacagccgcatccgcttccgcctgaatgggtgtcctgctgttccttatcgtatatctccataccgcagtccatgtgaagctggcttaagtcccttcctttattcttcataaactccagcaaaatggtccttcccacctctcccagatccccggtaatgattttatcataccaggtctcattgacctgaaaatcctccaggttctgctcaatggtgtggaatgctgccggagccatggctgctcccatattcatggaatccttggcgcccatgtccaccatgcgtcccgttgtaatgcctgcgatgcgggccataccatctttccggtttccagccaggaccacggcgccgcagcccgttaccgtccatgtggcagagggcggccgctggttcccataggccagcggaaaacggaactgtttttccgcagtggcaaaatggctggacgccatggacataacctggtccgcatatcctgcgttgaccgccattgcccctaatcccaatgcctctcccatggtggagcaggccccgtataacccgaaaagagggatctccaaatccacagtgccaaaggatgtggctatgagctgccccagcagatcgcctgcaaacagatagcgcaggtcaccctttcgtatgccgcccttttcaatgaccagatctgcggttttcttctgcatggtgctctctgcctgctcccaattatccataccaaacatatcgtccagttccacctcgtcaaacaggcttcccagagggccttccccctcctttttcccaacgacagagccagcgcttatgatgaccgggggatgttcaaattcaatacttgccttgcctttcatttgtcccatttcatgtactctccttcctgtgacaggatgtaataattacagtatccctcgtttccggaaaaatactcagaaataaaagaacctaaaaaggcagcctgcttatcagggatatttacaaaaacaaactgtttacatccatttcttcctctatcatgcctgatttaaacatgaaatcagctgttttctggaagcccgccttatcctcatcggtaacatccatggaaaaatcatagcaggcatacatttcccttaccgcctcttcatccaaatccagctcctctgccacaatctgcaggacctcatcctgattatccttcataaatgcggcaacacgcttctgggcttccatgaaacggtcaatcacatcccggtttttttcataaaaatcttccctgacagccacggcaataatggcttttatgagtccttctccgtcagccaccatatgatatccctgctgcttggcctgataagcggctgcacctgcaatgagggccgcgtccacgctgccgccgtccagggctgcctttgcgtccgcaatggacatattcacatattattcccttatgttttcttcccctgtcaaaccgactgtgtccatccccagataaccgtaaaaattttaggggacagggctggatttcaaacatgttataacctctgcctgtaccgcacactccgcacagacgccctccaccgtgccctccagctcctgcaaaagtccgttccttatcaggaaccagtgttcttaagtttaaggcatgacctgcatctgccagggccttgcatggcatgctgatcagtttctgtccgtcacataagtcaattctttctcagatttccctggctcaatgaatcagaatcggctcaatgtccggtattacagtgagcccctgtccccctaggcttcgctctccagggccatgtttttcatgtctatgtggtattccgctgtcatcctgcctgccgcaaggcatcgcataacagccactgtatccaagctcgcaccgacagaactttgtccttctcctcaacaacaactgcctagcccttattgcaccgcacctatatgagtccatactttttcaggaaacacgtcaatacctcccaggtacatgtcctctgccaccggattaatccatatgtacttcaacgcgaattttcctttatctcatgttagttacagttaaccaacatgagatattaaagaaactaaaatatcaactgcatgtttctgaaaagaaaaatatggaacaggaaatctttcccagtccctaactgcggttgtaccgcctgataaatctttttcacttactg

SEQ ID NO: 3421 - DNA, 706 bp, Unknown
  gut microbiota DNA sequence
catcatctcaacgtgagccggaacggaggaagaacctgcgaactgcgcatcagagtgcatacgtcccatggtatcggtcataccgtaggatgcaggacctgctgccatgttgtcaggatgcagggtacggcctgtaccgccgccggatgctacggagaagtacttcttgcccttctctacgcactccttcttgtaggtgcctgctaccggatgctggaatctggttgggttggtggagttaccagtgatggaaacgtcaacgccttccttccacatgatagcaacgccctctgttacgtcattagcgccgtagcagttaacctttgctcttaagccctcagagtaggactttctccacagctccttaacctcgcctgtgtagtaatccatctctgtctcaacgtatgtaaagccgttgattctggagataacctgtgcagcgtcctttcctaaaccgtttaagataacgcgcagaggcttctgacgaaccttgtttgccttctctgcgataccgattgcaccttcagcagctgcaaaggactcatggcctgccaggaagcagaagcagtcagtctcctcttccagaagcatcttgcccagatttccgtggcctaaaccaaccttacgctggtcagctacagaaccgggaatacagaatgcctgaaggccctcgccgatggcagcagcagcgtcagcagctcttctg

SEQ ID NO: 3422 - DNA, 2606 bp, Unknown
  gut microbiota DNA sequence
cttgcgctgggattcatgggcaacatggttcaggccaactctatcggcgctgcatttacagaggcttttggggcatttaacataactatctctccggttgtcattggtgttatcgtagcagccgtagcagcatttgttttcctgggcggaacacagaggctggcatctgttgttgagaaggttgtacctatcatggcaggcgtgtatattgtgggaagtctgattcttattatcatgaatattgctaatcttcctgcagctattaagatgatttttgtaggcgcatttgatcctcaggcagttttaggcgcaggcgcaggtattgcagttaaagaagccatccgtttcggtgttgccagaggccttttctccaacgaggctggtatgggttccacacctcatgcacatgcaagggctaccgcagagaatcctcataagcagggactttgcgctatgatcagcgtatttattgatacatttgtaatccttaacctgactgtattttccgtactgaccacaggcgctcttgagtctggcaagaatggtaccgctcttacacaggcagctttcatgagaggatttggtaccttcggtattgtattcgttgcaatatgccttttgttcttcgctttctctacgattctgggctggcatttcttcggccttatcaatgcgaagtatctgtttggcgatggcgcagcaaagatttactccttattagtagtggtttgcatcataatcggttctgctttgaagctggagctggtatgggatttggcggacttctttaatggtctgatggttatacctaatgccatggccctgcttgccctaagcggtcttgtggtaaagatatgcaataagtacagtgataaatagcatatgacgtataaagaataaatagtttagcagcggcagcttttccggaatatcatccgggggagctgctgctttttcttttcttccttgtaccgaatgaaaaccttgattggagggaattatttatagtaaaaagaaagcagaaatgaggaaatatgaatcatgatagactccattggaaagataacgctttacgtgaataatcagaatgaggccagggatttctggacagaaaagatgggattcatcgtgcgcctggaacagcagatgggtgctgaccagaaatggcttgaagtgggaccggaatacggaggcgggacatcctttgttctttatgacaaagaaaaaatgaaggctcagaatcccgatgtgaatgtaggccatccatctgttattttatgcaccggcgacctggagaacgcccatagagaaatgaaggaaagagacgttagaaccggagacatcatgaaaatgccttatggcagcatgtttcagttctacgatatggatgggaatgtgtttttgctgagggaggaagcccgggtgcattaaacttccgcgtacggttccgggccttccctttaaacggataccggagccgggccatggaagtattccggctgccggatggatagttggcgcgttcatgcatgtatttgtaaaccggtttaaaatgtgttagaatgtataggattagagcacacagcaataaccgggaaaggatgtctttaggaaaatgcagaaggccaacaaaggagaactgtccaatctgaaaaataaactgctggcagagcaggttcaggagcagatataccagtatatactggaaacgcccatagccgtaggcgctaaacttcccaatgaatttgaactgggagacaggttcagtgtgggaaggagtaccatccgggaagcggtgaaacttttgatttccagaggaattctggaagtcaggagaggatctggtacgtacgtggtcagcactacgccggtggacatggaccctctgggcctgggggcggtggaggacaagatggccctggccctggatttggtaaatgtacgcatcatactggagccgggaatcgcagagatggcggctctcaacgcaacccaggaggatgttctgaagctgaggaatctgtgtgacagcgttgaacggaaaataaagattggagacagttacatagaagacgacatcgccttccatacctgtgtggctgaatgttccaagaataaggtggtggaacagctgatccctattattgatacagcagtccttatgtttgtcaatgtgacccacaaaaagctgaccgacgagaccatcatgacccaccgggccgtgaccgaggctattgcggagcacgaccctatcggtgccaaaaccgccatgatgatgcatatgacttttaacaggaatatgatccggcagctgatgaaggatggacgtgaggcgtaggagcgtgccggtagtgtgacagcagtgcgggatgcgacggcaacgtgagagcataagaaccatgcagaagtatggtggtaatacggacatgggagaaagacagacctgataaatatttatacctataagttttagcagaccccggaagcaaataaaagggaatactttgacttataggtttttttgttttaattcattttaaaccaaaatacatctgacgacttttgcaaaggaatcagaacgaaaccagctaaacgtgcagaaaaat

SEQ ID NO: 3423 - DNA, 988 bp, Unknown
  gut microbiota DNA sequence
aaagttaaaaataactgtcggagaaacaaccacagatattaacgtcaacactctgggaacttctgaaagctttgataatttgctacaggaacttcggaatgttaccgggggaactgtaacgtacgcagataataaaatacaaatagatggggtagagctcactatagagggaacggatgcagacggtaaagcgttaatgaacagcctttttggcagtgatacgatatcgaaccacacgtccgctgacataaccgccggccagaacgcccgcctcacagtagacggcactgtcattgagcgtaattcaaacacctttgaactggatggaattaccatggaattaacctcggaataccatgatacaggcaccccaatacgcttgactacatcccgggatactgataaaatagtagacagtttaaagagttttgtagaagattacaacgcgcttgtggaagaactgaatgaacatctgaaagagactgcaaattataagaaatacgcgcctctcaccgatgaacagaagaaggaaatgagcgacaaggagattgaactctgggaggaaaaatccaaggagggccttctccacaatgacgccaacattaccagctttctgggcgatatgagaatggttctttacagcagtgtggagggcgcagggctgtccctttatgatatcggcattgagacatccgataactggagggataacggcaagcttgtcattgacgaggatgttcttaaatccatggccgccaccaaccctgatgccatatgcaagctgtttacagacagggaccaggggctgggaaccggcatgcagaatgcccttaaggacgcagccaatgtcagcagcggaagccccggcaccatggtgcgctatgcgggaacaaaggatgttcttaccaccagcaacaccctctatgaggagatgaagcacatttcagagacgctttccaatctgaataccaagtatcagctggaaaag

SEQ ID NO: 3424 - DNA, 205 bp, Unknown
  gut microbiota DNA sequence
tgtggtcaatgttcatatggtttttgaacagggtaagaagaatatgacttactataccactccctatggaactattgaaatggggattgcggcgacgaatctgaatctgcaggagagtgatggcggtcttgacatgaaagtggattatgcgcttgatatgaaccaggagcatgtggcagactgttatcttgcgattaaggcacag

SEQ ID NO: 3425 - DNA, 566 bp, Unknown
  gut microbiota DNA sequence
agtgatccggtggtatgaaagtgggattgccatcgctcaacggataaaagctaccctggggataacaggcttatcactcccaagagttcacatcgacggagtggtttggcacctcgatgtcggctcatcgcatcctggggctgtagcaggtcccaagggttgggctgttcgcccattaaagcggtacgcgagctgggttcagaacgtcgtgagacagttcggtccctatccggcgcgggcgtaggatatctgagaggagctgtccttagtacgagaggaccgggatggacagaccgctggtgtacctgttggcctaccaaggccatggcagggtagccaagtctggacgggataaacgctgaaggcatctaagcgtgaagcccccctcaagatgagatatcccatcgcgaaagcgagtaagaccccttgaagacgacgaggtagataggttagaggtggaagtgcagtaatgtacggagctgactaatactaatcggtcgagggcttatccagaaggttaagggaaaaaggtttgtaaacaatcggaattcaatatgtggttttga

SEQ ID NO: 3426 - DNA, 199 bp, Unknown
  gut microbiota DNA sequence
ggacccggatggggaggcaaggaaacagataagcgtcaatatgattgccaacatactgggcctgggatgggccgcaacgccggccggcttaaaagccatggaagagctgaaaaaggtggaggaggagcgcgggatgggcggtgcggccaggcaggaggggactgccagcaatgagatgtgtacatttctcattatcaac

SEQ ID NO: 3427 - DNA, 435 bp, Unknown
  gut microbiota DNA sequence
acgatcgttccagagctgaaaacgattctggagcttgtccgtgactatgacgcggttctcggcacggcgcatatctcaccggaagaatccttcacggtggtggaggcggcaagaaaccttggggtgaagaagatcgtagttacccatccggaatggtgggtcgttgacatgagcgttgaagatcagatccgcatggtaaaggactacggtgtgatcctggagcgctgctatgcccagaacatgggcggcggaacgtataagagcaatctgccggataaccttgagatcatcaaagaagtcggatacaaaaatgtcatggtcgacacagacggcggccagacagaaaatccgcactgggagcttgcaattgaagaatatatgcaatatctgcttgatcatgggatctccgaagagcaggtataccatatgacacat

SEQ ID NO: 3428 - DNA, 223 bp, Unknown
  gut microbiota DNA sequence
gttaaggggcggcgataaggagggggcaatggataccctgtcgcagcttaagaagaagcagagcaatatttctattgccacatctgagttaggaacaagagaaaaacttctggaccgcacagaggaccgtctggagacaggacttattaacttacagaagagccagacagacctggagtcggttaagattgagacggaggctattaacaacaaatcatgtgag

SEQ ID NO: 3429 - DNA, 1263 bp, Unknown
  gut microbiota DNA sequence
ggatatgttctcggactcctgctgtgcaaccgcaccgtatatagtcagtatcccttcactctcctccgtcatggtattcaggcgttccttctcaaaatacacacttacccctatttccttcagatggcggaccgtggataaggtgtccactgtgttcctggcaaaccgggtgattgatttggtcagtatgaggtctatccttcctttttcacattcctccagcatccgccggaagtcctccctcccccatcggctggttccgcttatgccctcgtccgcataaattccgcagaattcccaggccggatttttctggataagccctttataatactccatctgtgcgtcaaaggaatgatactggccatcgtcatccgtgctcacacggcagtatgcacacacccgtatgctccgtatctcgtatcctgcatgtcccggtttggcctttgggatgcatattacttctgccacttgctgcgcctcctttcctccgttttcaacaagacacattaccacacttcctgcaccatatcaagtatcagttctccgaatttccatattttcatacaacatgttgggaacatatcctttgatacttccgaaggaccatgtcatacatgacagggtcaatcagcctttggcgcagcagctcatccagtattttttgtacttccctaaatcgcaggtattgaagcagctccattgtttccatagttcctccgagaatacgctatttccacctcacggatttcctcatgcgtatcgttcctggagccgttatgggaatgcccatctgtaacacgttcatccattccggcctcgttccatcccacatccatgcagtcatcctggaagaacggctgcatgatctgacatcgaacccaccttctttctgtttcttatttgtgcttctatttgacactactccccgaagcttgtccagaaggatacctggacagggcagccagtccgcctgcctgcagcatacaggcatcataggaattccacctcctccgggttctccgggggccgccctcattgcgtggtccccggccaagggggctgtgactggacggaagtatcattgtcagctgtccgggattatggcgattcaaccctgcttatgattgattgggagtcgggtgtgtaccgctcttgccttaagatgtattgagcatccatggacaggatcatgtcctgcaggcagtcttcgcgcacccctcacgtcgctttcgttcctcacgaccggacagccaatgtaac

SEQ ID NO: 3430 - DNA, 369 bp, Unknown
  gut microbiota DNA sequence
acttcctctaaggacttacggcccaggttacgaaccttcatcatatcctcggatgtgcggttgcacagttcctctacggtgttgattccggctctcttcagacagttgtaagaacgaacggaaagctccagttcgtcaatattcatctcaagcactttctctttctcgttgtcttccttctctaccatgatctcagcagtcttggcattttcagaaagatcgataaacagattcagatgctcgcttaatacctttgcagcaaggctgacagcctcatcgggagccagtgtgccgttggtataaatctccagtgtcagcttgtcatagtcagtctgctggcccacacgggtattggcaactgccatattg

SEQ ID NO: 3431 - DNA, 175 bp, Unknown
  gut microbiota DNA sequence
gaattcctccctggtgcagaacatcaggcctcccaggctgatatccaccagacgcaccttcaggccgttgtaatcctctgactcctcccccatgtccagggtgtcatttccacgtatgcagttataaatgattccctcgtccctggtactgatccggaaatactcccggcgctcg

SEQ ID NO: 3432 - DNA, 1278 bp, Unknown
  gut microbiota DNA sequence
ctgggtattatccaaaatacattcaaatacagaattctggacgcgggtgccgtaattaacgcattgctttgcaacctttctcagcctggtcctgcctgcagcggtttccgtattcacatcatatgtaatcagtatcagcatgtaccttcctcctccggccgcagctgtcggatgtctttctatttccagaaaaacggcgggtattcatcaatgtcacctctcagatatctggacagaagcatggcctgaacaaaaggaatcattccccattccaccttctcattcagatatggatgggtgatcatctcctttttcttgttctgccattctgacaacaaaagcttccgtgcctcgtctctcatgatgacagcaccgtcttctttccgggaaaaatcttttttgtttaccatcttacggttaatcagggtcagcacaaaacggtctgcaagaaccggtctcagctcctccattaagtccagagccagggaaaggcggcctggccggtccgtatgcataaatcccacataaggatccaggccaactgtttccagtgctgacgcaacggtattggccagcagcgtgtacacaaatgacagcatggcattcacattatccaaaggcggccgcctgttccgtcccttgaaatagaaatcctttttctgctgtaatatgagctggtcgaaaactccaaaataaatgcctgcatcctcaccttcatactcccgcagctgagccatgtcccggctttcctctatgcgcctgagggattgtttcagaaatccggccgcttccttcatcttctctgtgtcaatctgaagtccatggtctctcaccgctctctccagaacccatctggcattgtatacttttccaagaatacagtttctggctatagtcagacttgcgtcctgattcatggatacctggtactgtttcctgcgcagtagtacatttcctcgcacacgtccggtcacgcgtgccaaaaatcttccctggggcgaaaggacgcaaagtgatatgtcccgctccgcgcatccgcccatgagggcagggctcattcccctgtacccaaaagaaacaattgcctccagattatggagaggtatccgccccagttccgtatcgttgtcatagattaccacattttctccgtccagcgacaggtaactgtcaggagaggtaacatacagggtatttaataacttcctcatacatcctcctcaatcttcccacggatataatctctgacagatgatgcttttcccagtttcggcaggc

SEQ ID NO: 3433 - DNA, 4287 bp, Unknown
  gut microbiota DNA sequence
atccagcgacagataactgtcaggagatgtaacatacagggtatttaataactttctcatacatcctcctcaatcttcccacggatataatctctgacagatgatgcttttcccagtttcggcaggcatatatctttcatggagcaggcattacagctctttgaccatctgacccttggtgtgtatcccttgtcataaagttcatgcatctcctgaaatatatctctcacccgttttcgcagttcatctgtgatctccaccatattcctgcggtgaatctctccgtaatacagcgcccctgcctcaattctggccgacaacatttcctccagacacatagcctgggccgtcagctgcagtatatctgcttccgactcctttgggctcccctttttatactccaccggaaatacccggaacagccccctgtgaccatgtagaccgattccatcctccgccctgtggaactctacaatatcgcattccccgctgacacccatactcctggaatacacgggcaatgccctgcttatcatgacatcgccccgcttttctgccaaatatgggtcatgggcttttttgtggagcagttctcctactatggtatgctcgttctccttccactgctgttcaatatgtataagggcccactggcgcctgcaaaagataaaatgctggataccggacagcatgaggaagtcatcctccctgtattccattatatcttctccgatacttcaactgtctccggaatctgatccctatggacggcaaccgtgtaatccccgtattttctgggatactccacatcctcattcctttttacttccacggcatcaaagagtttgtacgcaggacaatctcccagttccttactgtgtttaaacacaatgagccggcgtaccgccatttttcccctggctgcggaatggtcaatttcaaacatattgatgatggcatcccacaaaagttccaaatcctcttctgaaaagcccgtggattttctggccagattagctgatatgtatccctctgcgcggtacagggcgtagggaacgatattttttcttcccatttccgtactcttgttttccgcgtccttttctgtggtaatggccacacgggtaatggtcacttcctggcttacaatgggatcaatactcctggcaaagcctaactgaacaggtccccgcacctggccgcagtttaaagcagcctttacaaaggttgtcatgaccgcgccaaaggtccggatatcaaaaaagttacggcacataaaatcacggattttctgatctacctgagggtctttcctttttagttccttgattcctttttcatctgtcttaagttcaatgtacgcggtattgtcgcttctgtttaagggtacatcctcccgtatatatattttatacccgggttcgtcttccttcagggtttccacataattgcgtatcttacgttttaagcacacatccgtcacaatgccgtatccgctctccgggtcaatcctcggcagattgcctgcatccggatcgccgtttggattcccgttctccacgtcaaataataccacgaattcatacctgttcttaatcacctctgccattttaagcctcctcctttatcttcttctcatatctcttctgagtctgatgataataccccaatatgaacattccctgttcctccagggtaagccttcttgggcaggcggccctctgtccctctgccaccgtcagccttccctgtaaatcacacagcattttttcgtaatatatctcttttgccccattgttcatcttctttatgtggctgtttttcagcttaaataaaatggggaaaattgccgccggtgtggcgcatgcggaattaaaatatttatcctttatggtggcgttgatccccggattggcatcctcctggattgcctccagaaccgcaaattcccttcccaggatgtacgcggtattattgctgtcttcattaagcgccatggttatttcctcccttatatttccattttttagcagatatgccttgatgatggcagcccttcccctggttatcttataaatacggctgtccccgtcgtcctgctccgcccgtatcctgccaagcacggcctgatacagggacgccggataccggctgccggatataattgacctgtacactgccccggacatactgggaaccggctttttatccctggattttttattgaccgtctcctggagcatacgccatatccccagatactccacagcatcggctgccggacggactatttccattctgtcataatgttcttttatatgctttaatatgtttccaaagctgtcctgatagaagaaacgcacggccagcctggctgcgttgggtgccagccctaatatataaaaccgcttttccatatccagactgtccttaacatcctggaccgcaactgcttttccctccgccaggttcttgaataccccatccactatttcctggttctccatggtcggctccgacacacaggcaaatatattctggtaccgttcgtccccttcctcggaccagtaaaccacggccgtgtcgccgatggttgtcccatgggaccggtccgaaaggaggtaattgagcgccgtggtataggcataggccgcgtatgtacccaccggcgcgttaaagctctgttccttgccgtatgattcaaaggcaggcgcgttaaaggaaaccagcgcagccccgctggactgggctccctggacccctttgatggtgccgtgaatcctggcgatttcctccctgcgccctgtcaccaggcagacgccctcaggtcctgtacctgactgatggctgtattcttcccagcactgcattatatccgggtcctcatggacatattccccgtctatcatgaacaccagattagaaccggatataatctcctccagttccggcaccaggtatgggttttctgctgcccggtccggcgcccagcagtcaaaaaagcggcacaccgccctagctgcgggactgctgatattccccagaatgtccttatgcttctttttggcatactcaaaacattccctggatctctccggttttcccttattatcaattcccagcatataaccggaatggtcgcacaggaaattggcagatacaccggaacagcgggaaaccatttggggtaccgtaaggtcctggggtacccagactgtctttttgcctttctgctgctctttcttaagggggatgacacccataagctccccctgctctgaaatatccagcccgtacgctaccctggccctgcaccagcccggactggttatcttttccttccgctcaagggcttcataatattcaacaagcgcctggagaatcatcgcaccacctcacaattccttacatccagaacaccatccttcatgacagccctgaaaaacatgggtttaatgtcctcagtatctgagtaatccagatcatacagcatatatcccaaatctctctccgtgccgtcatatgcagtgtctacttcctcctcttcatagagggcaaaccgggcagggaattcccggcatccaaaatacggctgatgataacactcccccctgcgcaggcggcgcatgataatgtccttaaacttaccctcgttatcccccgggactgccttgggggtcatctcaaaatgggcctcaaccacatattccacatcccgcagaagaatggacgccctctgtacgatttcccctttgctgcttatatacagcggttttcctcccccgtttacggcagtcaatgcgtttcctgccaataccttgctctttacctcatttcttcggatgctggtaaactggatgggttttctcacatagattttatcaatcacccaccgcatccccggatgccagtagatcgcctccagcattccccttgcggcggaaggcgtcatcacatcatagctgcaccgttccaccttcatctcagggcggctgaagagggcataatctccccacagccggacccgtactcctcggctcatcgcttcactcctttccggcatacgccattttcataaaagggacttaaaacataagggcatccccgcggcttacgtcaatcacaagccccctctcccttgtatactgctccttattcctcagaacataaaattcccggtctatctgttccaggcggcctgcgccgctcagggcttcaaaatcatgttcataaacatttacacagtactgtccggcctgcctgataagctccctgctatgcccgccc

SEQ ID NO: 3434 - DNA, 11156 bp, Unknown
  gut microbiota DNA sequence
tttgcgtccaatccctcccctttataccggtacagcctggtgaaatattctcctatggcctccggcgacgatatatcttcatacttctgcgcaatctgtccggctactgaaatgggcagtttcaattcccgcggtatatggatatcctcctcttcctccaacgtaaatacctgggtcatacattcttccggatccctctttccctcccggttgcaccttccggcagcctggatcacactgtcaattccggccagttccctgtatacggccggaaaatcaaaatccacgcctgcttccaccagactggtggatataagccggcatggttctcccgacgacagccggctgcgaatctccttcaagatctccttcctgtgttttggatacatcaaggtagataaatggtacgtcccccggctatcaatggaatcgcagacgcgctgcacccgttttctgctgttcaggatacagaggacctgctgccggccttccagctccttcaccagatgttcctgggatatccgccctgccagctgtatctttgtccttttgaaaaaatcatactgtccttttacatccggacatagttcctctgccttcagttcctgcatctttgcaggaaagaagggctgcagggacggctgggtagctgtacagataactgctgtgcagtgataattgcatataagctcactgatagcccgaatacacggcatcagatatttcaccggaagcatttgcgcctcatcaaatatgatgacgctgttggcaatattatgcagtttacggcattccgaggttctgcaggcatagagagattcaaaaaaacgaacatttgtagtgaccaccaccggcttgtcccagttttctgcggccagctgctccatttttaattccttgccgctctccttatcctcatatgttacattacaatggttttccaggacatttttctttcccaggatttccttaaatacctgggcgttctgttcgatgatactcgtatacgggatcacataaataatccgttgaagaccatgttccgccgcgtggcgcagggcaaacccaagggaggacacggtcttgcctccgccggtaggtaccgtgagctggtacagtccctgcctcctgcgtcctgcctgcaaacaagccttcagtatagccgtccttcttccatttacagatgtcaaatcatcattggaaagccaggattccacatggctttccagacgcctgagaaggacatccatacaatcatagtctccccttcccgcatcctgtcccagcatgaattgttccgtatccagataatctccgtccacaaggcatgaaaacagcatcctgataaaaaatgacaggccaaagccgcccttgcctatctgtctcagcggcagcccgggaaaatccggcatctcaacttcatttttatacggactgtaatcctctaactgctttttaagccttccctgaagcgtggcctcccctgccgtgtctccggtccttcccccgtccagaaggcctgaatggtggccgctgatgcaataagcggcgcagtaagcagccagaggattggacccggcatacagccgcatcatctcctgggctcccgccgtggcgtggtccgtaatggaaccgccctccagacgttttctaaatccctgggaatattttccgatgtcgtgcagaactccgcatccgtatccccatgctccgcaccggaacgcttcggcaaacagttcagaacgcctggcggtccctgtgagatggtcctttacggtctgttttcgagtcttgtcctcactgatgtgcgcatagtattgcataggttccccccttcccccgatattgtacaaattataacatatatttgtcttaaattaaataattttggcaaatgttaccatattcattatttatataaagacaaatattttcgttcaatgcgtcataaatatagacacacctactgctcttccacaaacagcggaaatccatcctcggccctgcaatctccctcctgtaccatctgcgcctcatcttccgggtactcaatgcagcaccccctgcctcttgcccgtgcgcacttgggatatttgggacagataaattgataacaaactttatctggacttttttgctccattttaattttcctccttgatttttatttttttctttcattatagcgtgactttctctttatttcaattattaataactgaaaatttgttaaaataaaaactattatgaaaacaatttaacaaatattgctttttttatatgaaaatgatatggtagttaatgtaatcggaagcaaggctctatgagccttatttataggagtgtaacaacacaaaacaaggaggtattacatgaacaaaccagaacttcagaacaggtaccagctttttataggggggcagtggcgtgacgcttctgacggtgaattctttaccacaaagtgtcctgccaatggagaaaagctggctgagtgtgctcaggctaccaaggaagacgtggatgatgctgtcagggaagcatggaaagcatttgaaacctggaagaaggttcctaccagtgaacgcgctgccattctgaataaaatcgcagacatcatcgacgcaaatacagagcacctggctatggtagaatcactggacaacggcaaaccaatccgcgaaaccatggccatcgacattccgttaagcgcaaagcacttccgctactttgcaggctgcatcatggccgaggaaggcagcgccaatattctggatgagcagttcctctccctgattttacgtgaaccaattggtgttgtaggacagattgtcccctggaacttcccattccttatggccgcatggaaactggctccggttctggcagccggctgctgtacagtattcaagccatccagcgacacatccctttccgtcctggaatttgccagattagtgcaggatgttattccaaagggcgtattcaacgtgattaccggatccggatccaagtcaggccagtatatgcttgaccacaagggattcagaaaactggcatttaccggctccaccgaggtaggacgtcaggtagctctggcagcggcggaccggctcatcccggccaccctggaattaggcggaaaatccgctaatatcttcttcccggactgcaactgggagcaggccatcgacggcctccagctgggcatcctgttcaatcagggccaggtatgctgtgctggctctcgtgtattcgtacatgaggatatctacgataagttccttgaggacgctgtaaaggcatttaacaatgtaaaggtaggtgtatcatgggatcctgagacccagatgggcagccagattaacgagcgccagctggaaaagattttaagctatgtggaaatcggaaagcaggaaggcgcccgcctgatctgcggcggcgagcgtatcacggatggcgaactggcaaagggctgcttcatgcgtcccactctgctggccgacgtgaccaataatatgagggttgcccaggaggaaatcttcggaccggttgcctgtatccttaaattcagggatgaggacgaggtcatccgcatggccaacgacaatgcctacggccttggcggcgctgtctggacccgcgacttaaaccgcgccattcgtgtatcccgcggcattgagacaggacgtatgtgggtcaatacatacaaccagattccggaaggatcacccttcggcggctacaaggaatccggtattggccgcgagacccataaggttattctggagcactatactcagatgaagaatattatgatcaatctctctgaagctcccagcggattctatcctgcaaaataaaatcttatatccgcttagtaaatgattgaatctatgtattacatgataccataaaaccggaaaattcctcatgacagcagtgcatgggggattttccggttttatatttctaattccattcattccaaacacctctgactgcatcaatccataaatatggcgcattctaaaagcatcccaaaaacatttaatgaaacctacgggaaaatatgatcaaatatcacttgacatatgttactgtaacttttataattacagatagtaactgatatttatttgattacagtttgctcagaaaggaattgtcatgaacaacagccttaccggatttctcggtacctatgcctcgcctgaaagcctgggcatttaccgttttaccattgatttaagaaacggggcaatgtcttaccctgaattatattatgaagcccctgattgcaagtatctttccctgagggattccatgctggcttccccattaaaaagagagggccggtccgggatatgtcttttggatacagcccataataaggaggaagcccttgctcaaccggcagcggaatgctttggtgagtcctcgccggcctgctacgcggcccaggatgaccgctatctatacacggccaactaccatgaaggtactatactgatatatgagataacatatgaggaaggttcccccggacgtaaaaagcgtccctccctcccgcatcttgaactggctaaaagaatccccattgcgcctaaggccgggtgccatcagattttatttcacagccactatatgatggttccctgcctgctgctggataaaatgatggtatttgactgccaaaaggattttacccttgtatcagaactggcctttgacaagggaaccggcccccgccacggaatttttgacagggaccataagcagttcttccttgtcagcgagctgagcaaccaggtttttgtgtacagtctgacagaagacggggccgcagggacagacagcagccataacagtatatcccttcctgacttttccatgaagctcctgcaaatctgccccatcctgcctttggatgcagtatatgaggaaccgcctgcatcggcagccatacgcctgtcaccggaccaacgttttttatatgtatccacccgatttgccgaggtcataacggtctttaaaatcagccatgggcggctggagcaaatccagcaaacaggctgcggcggcatccatccccgcgacatggttcttacgcctgacggccggtacctgctggtggcaaaccgcacccaaggcggactggtcagctttcagctcaacccggaaacaggggagctcctggacatatgctcccgcgtacctgcgccggaagctgtttccattgttctttcccagcatactatttaacccatatttcgcctgaggaggtagaagaatgataaaacttgatattggaatcgtaggtctttccgttatgggaagaagtcttgccctgaatatggctgatcacggatttaaggtgggcggttataaccgcagcgccgctgtcacagagcaggtcatgagggaccatcctcatgagaacctgatacccttttatgaccttaaggacatgacggacgcccttgcccgtccccggaaggtaatgctgatgatccaggcaggcaaaccggtggatgccgtcatagaacagctggttcctcttcttgaaaagggggatatgatactggacggaggcaattccttctttgaagataccagaaggcgggcagccctgctggcagaaaagggaatccactatctgggggtaggcatttccggaggagaggaaggcgcccggttcggtccctccgtcatgcccggaggaaatgccgatgcttacgaatcagtacgtcccatactggaagccattgcagccagggccatggatgagccctgctgcgcctacatcggcccggacggcgccggacattatgtaaaaatggtccacaacggcattgagtacgcagatatgcagctgattgctgaatcctatcttctgttaaaatatgtgggcggattcaacaatcaggagctggctcatatctttaaatcctggaacgaaggggagctttacagctacctgattggcattactgccggtatcttccgtgaggccgacgacctgggggacggggagctcattgaccgcatcaaagacagcgcaaaacaaaaaggaaccggaaggtgggccagcatagaagccctgaagcaaggcgtggatatctccatgatcacttccgcctgcacggcccgtattatgtccaatcatctggatgaacgtgaaaaggcatggcagcttatccattcaccggctgtcggcctctctcctgataaagagtcgtttgcagccatggtccgcgaagccctgtataccggaaaaatcatcgcatatgcccagggcttctccctgatgcaggatgcatccaggctgtacggctggaatctggacctgggaaaaattgcttccatattccgcgccggatgcattatccaggctgttttcttaaatgacatcacccatgcatttgaagcggaaccaaagccggaaaaccttatattcgatggtttcttcctgtcccgcatcaacgagcatcaggacagcctgcgccaggccgtatccaccggcgtcatgaacggccttcccattcctgccctctgcaacgcagtgtcctacctggacgaattccgcgcaaaggcggcaggcgccaatctgatccaggcccagcgcgactgctttggagcccatacctatgagagaacagaccacgaaggcgtattccaccatgaatggaggtgggctaatgacaatcagcactaaccttaccatcttcggcggcaccggggatcttaccttccgcaagcttcttcctgcactttataccatggatatcaccggaaagcttccggaggccagccgcatcaccatcattggccgccgggactacgacagcagccattaccgtcagattgccagggactgggtggagaaattcacccggctctcctttgaggaaaaaacatttgaccgtttttctgaaaaaatagattattaccggatggatttctcccgtttggaagcatatcatggactgaatcactattacagggaaaatgatatccactcccacatcttttactttgcagtggctccccgttttttcagcatcatcacagaaggactcaaactggtccatggttcttcctccggcaaggtgatacttgaaaagcctttcggcgagaaccttgctgcggccgcagcccttaacaaagagctggaagcgttctttggcccggagcatatttaccgcatcgaccactatcttggaaaagaaatggtccgcaatatccaggcaatccggttttccaatcccatttttacagacgtatggaattcccgctatattgaatctgtgcagatttccgccctggaggatatgggcgtggaaacccgcggcggatactatgatgccagcggcgccctgaaggatatggtgcagaaccatctgttccagattttgtccatcatggccatggaacagccggaggaattcagccctaaggggctgcacgatgcccagctggatgtattccgctgtttacagccggcagatgagtcatccatagaaagcaccctggtcctgggtcaatatgagggataccgcggcgaacctcttgtaaaaccggattcacagacagaaacctacggagccctgcggcttttcattgacaaccagcgctggaaagggacccccttttacatccggaccggcaaaaagacagggaaacgcgagattgaactggctgtcatattccgcaggccctatcaggaagtagagcccaacatactaatcataaagattcagcccacagaaggcgtctatctgcagtttaatatcaaacgtcccggtgattctgaggatatcataccggccaagatggatttctgccagaactgcagcctgattcatcagctcaatacccctgaggcctatgaacgtcttatcactgcctgtatggcaggtgaacgctcctggttctcacaatgggaccagatagagtttagctggaattacatcagccatctgaaggaactttactccgcaaagcggctgccggtgtatccttacaggcccggaacccgtggaccggctgaagcggaccggatgctggaacaatatgggcatagctggctgtaggtgtctgcaaacagctgcaggggcttcaggcgtcttagacagctttaacggcagcagaccacaggaggcacaatatgtacagtaaagaagaacagaaaaaagcggctgcctggcaggcggccatggaggtagaggataacatggtgttgggcctcggaaccggttcaactgtatattatctcatggaaaaactgtccgaacgaatccgcggcggactgaatgtccatggggcagccacttctcttgagacggaaggcttggcccgctgtttgggcatcccccttatctccctggaggatgcccggaccatacacctggctatcgacggggtggacgctattgacccggatttctattccattaagggcggaggcggtgccctgttccgtgaaaagatcatcgcctgcaaggcccggcgggtcttatggattatggaccagagcaagcttgtacattccctgagcggatgtgtgctgcctgtggaggttcctgcttttgcagttccctatgtggaggaacaggtaagggaagcagggtttataccgaagctgaggataaaaaacgggacagtatttgtcacagacaacggcagccatatcctggatctgacaggaggcgttgaaatggattaccccatggcagcggttcgtctcaaatccatgaccggcgtcttggaaacagggctgttcggtgatatctgcgaaaaaatcatagtgggaacggaaaacggaacccaagaacgcttccataattgaactacacagacagaaactagcgctcccagacacaccagaaaaatcccggactctgcatcatacagaatccgggatcttttaatatacatatctgaataatctcatcagctaatatccaacaatcattaatcatcaaaccattcatcaatccgtctatgccgactttgcccttgcagctgccttatcctccagcttggatacaaacaccgtgcctgcaagatctcccaggcagttgttggtggtggttcccatgtcaaacaggcggtagaatgcagctatgattcctacaatctctgtaggcaggccaaaagcagttaccatgaccagcagctttacgatgccgcttcccgggataccgccgccgccagtggaaagaatagctgacatcagtatgatcttcaccatggttcccagagtgacaggaacaccgatggtctgactgataaacaggatgacacagccgtacaggataacgctgccgtcatagttcatctgtgagcccaggggtacggtgaagccggaaatagtctccggaacattgaatttctccttggccactttaatattaatcggaatggcagccacactggagcaggtggaaatggtgtatacccacagctccgcactgtcctttaaaaacttaagaggattgattcctgcggtcacccagataactgtgcagtaaaccagtaccacatgcaccaggcaggccagataataggtgcctaccagggttgccatgctggtaaagatgccggctccgtactttccgaaggaatctcccatcaggaagaatacgccgattggagataccagcataatcatgttaatcagtgaaaataccatatcattgagcacgttcatgcccttgatagccttctccttgtgctccggattcttcatccttaaaatcgccacgcccagcagaatcgcgatgactacggtctgaaggatattgccgtccgcaaaggtctggataatattggatgagaacattcctgtgaagaaatcagctaccgtgatgtccgcgctgcccgttacttccttggatgccagtcctgtaaaattagctatggtgcccggctttacaatggatgtaaccaggatgccgatggcgcaggcaaccagtgtggtgataacataatacgccataatgcggaagctgattcttcccagtgtcttcatatccttctgtgaaacaacacccgtcacaatggtaacaagcaccattggaacaacaatcattttaatacaattcagccagatagttccgataaacccaactttagtcattggttccccgatgacaattcccaaaaccgctcccagcagcatagctgcaaatatctgcgtggataaacctatctttttaccagctatcttcatatgtcaaatccccctttatcgtaaagaatccagttcacgtataatcgctaccgctttttccgtatcctcccttgaaatatctctgtaaaataccagtcttaccttatcctttaacaccggcttgattaataaccccttttcggccgccttgccgcagtactcccccggtgtgaggcccagtccattggcatccaggacaatgatattgctcatgacctttccatatacctttgtgttctttaaatcctttagctgctcagccgcataggcagcattggcgttatcctctgccagccgctcaatgttgtgcgtaagggcatacattccaggcgctgcaatcacgcctgcctgcctcatggctccgcctaaaagctttctcttgtccctgatcttcatggaaaacgcttcagaacagcataccagggaaccgataggcgcccccagcccctttgagatgcagaacatcaccgaatccacatatttgcacatttcccgtgcttccacgcccagggccaccactgcattgaacatcctggctccatccatgtggacaggaaccccaaactcctttgccagctcatgaatcgctttcatcctctctaacgggacacaggtaccgcctgaaaaattgtgggtattttcgatgcacagcagggcaatctcctggctctccaaaatgcggcgcatgtcgtcaaggtccggcaggttatcctggtccaatttatatgtaaccggttcaagctgcccgatggatgggtcaaataccaccttctcgcttaagtagatatgctgcatctcatctaccatcaccttctggccgggcctgcaataagccagaatagcagatgtattgccctgtgttcctgacgggaacaatacagccgcctcttttcctgtcatctctgccgccaggtcctccagt

SEQ ID NO: 3435 - DNA, 572 bp, Unknown
  gut microbiota DNA sequence
cgtaaccggttcaagctgcccgatggatgggtcaaataccaccttctcgcttaagtaaatatgctgcatctcatctaccatcaccttctggccgggcctgcaataagccagaatagcagatgtgttgccctgtgttcctgacgggaacaatacagccgcctcttttcctgtcatctctgccgccaggtcctccagttcattgactgccagatcctctccccttcctttggaatccgtccttccgtcatcccccagctttgcctccagtatggtctccagcatttccctggttggcatactgatagtgtcacttctcaaatctaccatttcattccctccttaatggttatatggtattaataagcaatatttatgccatttttcttctttggtatggaaaaatacgaaaaaacagctatattcagagatatttttactaatatctgcgaaatatagctgtttttttgggttttctgattcaataactgatgtatggatggaaatatatcccagattatgtaaatctttttcatttggcgttttctgtcgtgtgtcgcagattatatcaaaag

SEQ ID NO: 3436 - DNA, 227 bp, Unknown
  gut microbiota DNA sequence
tgtttatgctgtcagccatgaatctgtataggctgttcattgggcatagggctgcaaaggcagatggggcaggttcagatgatgagcaggacccatggagaattttgtatgaggatgaagatgacgaaaacgaggatttaggtaatcaaccatctactgcgtatatgaatggggataaaaatgagtatttgcagaaaatgccggaaagcagcgccggagagtgcttt

SEQ ID NO: 3437 - DNA, 1784 bp, Unknown
  gut microbiota DNA sequence
gttaattttcgtgcactttaaccatataaactctgttcaatataaaactcttccagggacagctcattatccttcatatagtttgccgcttccacccctacatagcggtaatgccagggctcatactggattccggtaatatccgtcttattctccccataccgcatgacaaaaccgtaatcctgggcatgttccaccagccatttactctccggtgtatcctcaaaggccctttccagcttgtggtatcttctggtatagaagtccactgccaatcccaggcagtgctctcctgaaccgggaatggatatggtctgtctggccagattgtaggactcctccttggtatgtccggccttcacaaaggacaagaccttcctgttaaacagtttttcctgcttgtccagcgtcctgtagccggagcacactatcggagacaatccctggtccctcatatcgccaatcatagccatcagcggctcatagattctcttatccactgactgctccgtaccgggaatggcttccagttccacctcatagtcttccagcacaggatactctgcgttggtaagtatcagacaccacatatcctccggcagaattttaagtcccccatctgcgtccatctcaccacgttctttgtaaacccgcgctcccggcaacccttccggctgttcctgtaccgcttccttcagctgtccccctgtctgacctcccaccacttcctccggcagtcctaccgaccgtccttctgccagttccttcacctgctcccccggcccttccgccgccgtctccgcccgcagcgcctccatttcccgctccttctggaccgtcctgtgggccgatatataaaacagggtcaggatcagcaggaatgtataaaccgccacccgccggttcctgaccacacgctggtccctgggcttcttctgagccataatacgcgcttcctcctaataatgccttttcttatccctcaaacctaccgtatccgccgaagctggtccccctgccgtctgaggatataccggtacagcaggtcctcctgctttgtggccatttccatgaattcgcatccgtagccgtacccgccttccggacgctccaccctccggcgcacctcacatatgaacagcatggaatcccccatggccggtatgacgatgttgaaacggtcattgaccttgaattcctccctggtgcagaacatcaggcctcccaggctgatatccaccagacgcaccttcaggccgttgtagtcctctgactcctcccccatgtccagggtatcatttccacgtatgcagttataaatgattccctcgtccctggtactgatccggaaatactcccggcgctcgtcattggtggcctcgcttaattccacgatccggaccagcttgggagaggacaggtatacccggcccatgagcaccttaaatccaagctgtgtgttgtatatctccagcttaataagcaaattgtacggaattcccggcagctcattgcgggaactgcccacatctatgaagtttttgcctatacgatgcagtacccccatactgatcaggtcgttgttcttagcctttatgacgcaggacgaacctacatacccgtccagcaaatcaaccatcttccacaccccctgttatcatactgtctgttgactgtcatccttgctgtgtctggataccaggttccggcgcaggcggccgggctggctggcttcctctttatgtccggcagatgcggattctgaacggcttttttccactccc

SEQ ID NO: 3438 - DNA, 1237 bp, Unknown
  gut microbiota DNA sequence
taggcggccgggctggctggcttcctctttatgtccggcagatgcggattctgaacagcttttttccactccccgtatctgggcggaggtttcaatgagcttgcagtaaatggctgcaaccacctcgtacagctccaccggtatattgctacccacatccagcatacacagcagggatgccgcgctgtcgtccttgaacaccggaatcccctttttttccgcaatatcaatgatgtgttccgcaaccgttccataccccgaggcaatcaccaccggggatgtgtcctcatctacattgtatcttaaagcaaccgctttatttttcttatattttgacatctacacccgtccttttaaacggcagatttttgaatacttccatcagggaacgcacatggtccatgcgctccacctctatgcctgacgccttgtatccgtgttcctccatgatattgcggaactccggaaccaggctttcaaatattcctatataggattccggacaatacagatggaatcccagttcctttcccgccatcataaactccgcttccatctgacccacccccggcacatcaaaggttatgagcacatggacatgaccgccctccctgcttcccggctccccattccggccttcgtccttgggatctatccacagttcggaaaatgccttcattccctggtaatccacaggtatcacaaagtgcaggagaggcgtgtagttgcatggggatgacaaaagacttgtgatgattttctctatcttttccccgttcaggctgttcatgggagtctccctgtcctgtttggcaatgattttagccagggtgtccatgatgcgggaacggttcatctggcgctccggctccctgaaaccggcgatgtattccttcaccagttccctgatatgtgccttttcctccctgtcgtttacatggatcagaagattcataagggcttcctggagaaaggcgtcattgtcctgatagcgggacatattgtacagtatgttgggaatgaccctggcagcctggggcgtatagagcacgctctcctccagctcctttagggcctgctgcacctggggcttcagttcctcgaattccaggctcccccggctctccctgacacgggccgcaagctgtgaaaacatacctgacaaattcctgctgcctgtcagctgctcagacaggtattccaggctgttggccacagagtccagcacatcctgcct

SEQ ID NO: 3439 - DNA, 2114 bp, Unknown
  gut microbiota DNA sequence
aacacgggccgcaagctgtgaaaacatacctgacagattcctgctgcctgtcagctgctcagacaggtattccaggctgttggccacagagtccagcacatcctgcctggatatgctggcgttaaccgcctttaaaagctcagctgtctccatacgcaaatccggcgttttttccagaattcccctcagcaaatcaaagagctcccctttgaacagggtggacgcgtactcctggtctaccagttcgtccacgatatggtccgggtcaatgagaagggcgtcaaagagctggcggatttcctgggtcaccgtattgttgttcacaggaagcagattgatgatttcctccagcatataaatatttttcagatagttgacggtcacggccgggtcctttaacaggttcataagggtggctgccccggcctctccctccagcacattgtgatggcccaaaagaccgctgcccgacgggttctttgtaatatgcctgatctcctgcatatcaaagggaaccgacgggtcctttaacgccttatccggctgtatgatgtttttgttgataaccggagaggtcacccgcaggatatctgccattaccgaattcctttcttgatttccccgtcaagataatagaaggtgcaactatcctccttcttggaaatgctcatcttacaatccccgatattaataacggttccggggtatacctccctggccgtaagcctggacttgcctacctccctcagtttcctggaaagctcagctccctgctgcttcagtttcttttccttcagcgaattaatgggggcttccagctttaacttggataaccgttcccgctgggatggagtgatggtcccttccttcagcttaccgctcagataagaaatatctttgttcagctccgtcagctttctggagagcagtatcatctccttgcccactgcctccatctcatccatgagctggggcgtcaggcccagggtcacagaggtggcgatatggctgggtgctcccactgccttcacattcatgcagttatatacagaacagcttccgccgataaacgcccctctttttccaattaatgtcaaatcgtggccacaggacacctccgagttaatgatatattctgcctggatattatttctggaaaagatattgcagtcctccagaaacttggccgtgatatcgccctccgcctcaagcacgccggttctcatgccccgcatgcccttgtgcagcagaatatctccccccgcgctgagccgggcgccctccacgattcccataaccgtaatatcgccctttgctttgacgctgtatccctccagaacatccccgtgaatcaccacgctgcctgtgaagttgatattccccacggaattgtccacattgccggacacggtaaatacattctccacatggaaacggccggaccggaaggtcagattgccctcgcaggctgccagcagcctatccctgtcttcagaataaacaatgttcctgccctggggaacgggcggcatggttcccttcttcccccgcacaggctggccaaacacgtccataccgtctccgggttccgtgggaagtgtaatatcgcagacaacatcacctttttttacattatgtatcagattggtgcttttaaagtcgattccgccgttgcccttggaggcgtacttaatctgggccttcctggggtaataatctttaatatggccgtcctccccgttcctggcaggctcgcccgcagctatcataaccatctgcatatactgctgcccgctgacaacccagcttatcttcttctggtctatgccaaaacagatccccttctgctccagcacatcatacaccatttcctccgttatatcacttccgcctccggatggtccgtaaaccatcatggacaccgacatcctgtcatccgagaccagaacctccacccaggcgtcccgggtaacttcttctttctttatgccgtccttctgtgcgccgcagccttcataatcgccgccgtccccggaaccgggccggtcctcatcatatgactccgactcctgcgtggcgctttccggatgctcctgccccagaagctcgcgctc

SEQ ID NO: 3440 - DNA, 171 bp, Unknown
  gut microbiota DNA sequence
aagaacctccacccaggcatcccgggtaacttcttctttctttatgccgtccttctgtgcgccgctgccttcataagcaccgccgtccccggaaacggaccggtcctcatcatatgactccgactcctgcgtggcgctttccggatgctcctgccccagaagctcgcgctc

SEQ ID NO: 3441 - DNA, 115 bp, Unknown
  gut microbiota DNA sequence
tcccttggaagcgtacttaatctgggccttcctggggtaatagtctttaatatggccgtcctccccgttcctggcaggctcgcccgcagctatcataaccatctgcatatactgc

SEQ ID NO: 3442 - DNA, 750 bp, Unknown
  gut microbiota DNA sequence
agatttttgtcttgacaactgaaccactatatgctgcaccgataccgacacctactaaaatgtaagggaatacttttttaaacgtttccgttacctgttccctggcaaaatatagccggtcttttctggttagagcaggagcatccatatcaataccattggctgatttaatgaattcctcaacgtatttttccatgtgaagcttttcaatcagagcgcctccggccactgctatcattaggccaactataacataagcaattgcaatttttgcgccaaatatgctcatcagcagtacaaggctgcccaaatccaccattggtgaggaaataagaaacgagaaagtcacgcccaacggtaaaccggcacttgtgaatccgataaagagtgggatggatgaacaggaacaaaatggggtcacagtacctaacaaagctgaaatgatataagaaccaacgccatgaaagcgtcccaatattttcttacttctttcaggtggaaaataactttgtatataagagataataaaaattaaaaagcataagaggattgttattttcaatacgtcgtaaataaaaaattgaatacttccgcccaatcggccgtctacatctacgttaagagcggttaaaagattttttatcagggagtttaaccatttcattcctaatatttgatcctggataaatagaaaaaatgtttgtatcgagtccaaatgtattacctccatttccattgtaaatatcatat

SEQ ID NO: 3443 - DNA, 145 bp, Unknown
  gut microbiota DNA sequence
caggtccgacactttaagctcctttgtgatgaacagtcctacaaacatggaatacaccactaccaccacggctgcttccgtgggagtaaagataccgctgtatatgccgcccaggataatgaccggggcaaggagaggccagatt

SEQ ID NO: 3444 - DNA, 318 bp, Unknown
  gut microbiota DNA sequence
gaaaccttgtcattatcaccattagttaatgctttaccattagcctggaaataataccagtaatgatccggctcatcgtcctcgccagcgtcctcgttgtcgatagctacccactggttagctgccataacgccgttgatgtctacataataatagttgtcaccatcttcaatcagctgatcgatagccatctcgccatcgctgtccagccaataccaattgttgccggactttttccactgctcagttgctctctcgccgtctctgttgtaatatacccaagtaccgtcttcctcagcccatcctgtagctgcgaaa

SEQ ID NO: 3445 - DNA, 307 bp, Unknown
  gut microbiota DNA sequence
cctgttcttaaattcaggataatacttatgtatctcctggtatatccttttgcccgtggcctccatcaggataatatggggtaccgggcaatccgacagatattcaatcagttccctgtagtcgattccccggtccatgccgcctatgagaactgtatccgtatccttcagcgtcttaagggcctgaatggtggtatcgcaaatggtggagatggagtcgtcataatatttcacgccctcccgctccccaatatactgaagccggtggggaaggggttcgtatgtcttaagcccccgggcaaaaacc

SEQ ID NO: 3446 - DNA, 8958 bp, Unknown
  gut microbiota DNA sequence
gtatatgagcggaaattacaacttatgagccgtgaaaaaactggcagggccttccaaagagggaaaaaacagggggcacgtcttgacgaacatgggggaaacgcttatacttaaaactattaaaataagcggattgggcgctgcggccgccggagcatttttatggactgctctgccccggctctttgtttccgctcagaaaaagagggaattaatcatatgtgtcaggattgtaaaaagccatattatattaccacggccattgcctatgcttccggcaagccgcatatcggcaatacctatgaaatcattctggctgacagcatagccagatataagagggagcagggatatgacgtgttcttccagacaggtacggacgagcatggacagaagattgaagaaaaggctgaggcagcaggtgttactccccaggagttcgtggacaaggcagctgctgagataaagcggatttgggatttgatgaacacttcctatgataagtttatccgcaccacggaccaggaccatgaggcccaggtgcagaagattttcaagaagctttacgaccagggcgatatctataagggatattacgaggggctgtactgcactccctgcgagtcctttttcactgagtcccagctggtggacggcaagtgtccggactgcggacgcgaggtaaaacctgccaaggaggaggcgtatttcttccgcatgagcaagtacgctcccaggctgatcgagtatatcaatgagcatccggagttcatccagcccgtatccaggaagaatgagatgatgaacaacttccttcttccgggacttcaggatttatgcgtgtccaggaccaccttcagctggggcatccccgttgattttgacccgaagcatgtgacctatgtatggctggatgccctgaccaactatatcaccggtattggttatgattgtgacggcagcagtacagaccagtttaagaagtactggcccgctgaccttcatctgattggcaaggatatcatccgattccacaccatctactggcccattttcctgatggccctggatgtgccccttcccaagcaggtatttggccatccatggctgctgcagggcgacggtaagatgagcaagtccaagggcaacgtgctctacgcagataccctggtggatttctttggcgtggacgcggtgcgctatttcgtgcttcatgagatgccgtttgacaatgacggcgtcatttcctgggagctgatggtggagcgcatgaactccgacctggctaatatactgggcaacctggtaaaccgcaccatctccatgagcaacaagtattttgacggcgtggtctgtgacaagggtgtctgcggggaagcggacgaggatcttaagaaggtagtgctggaggaagtgaagaaggctgatgccaagatggagcagctgcgtgtggcagacgccatgacggaaatctttaatatcttcagaagatgcaacaagtatattgatgagacaacaccctggacactggccaaggatgagagccagaaggacaggcttgccaccgtgctctataacctgacagaggccattgccatcggagcatcccttctgtactcctttatgccggagacagctgaaaagatcctggcacagattcatacgggcaagcgtgaactgttccagatggatgcctttggattatatccaaacggacaaaaggtgacggataagccggagattctctttgcccgcatggacatcaaggaagtgctggagaaggtggaagccatgcatggggctgaggcagcagaccaaaaacaggcaggcggccaggacggatcctctgataatgcagaggacagcggcattgacctggaggccaagccggagataacctatgatgattttgcgaagcttcagttccaggtgggggaaatcatcaagtgcgaggcagttcccaaatccaagaagctcctttgctcccaggtaaagattggaagccaggtgcgtcagattttaagcggcattaaggcttactactctccagaagagatggtgggcaaaaaagttatggtagtgaccaacttaaagccggccaagctggcaggcatggtgtctgagggtatgattctctgcgcagaggacgcagagggcagcctggcacttatgacgccggagaaaagtatgccggcaggagccgaaatctgctgatggttcggttagctgtgagacattaaaaagaatatgatgaataccggacaggaaccgtggaaagcgtgtgctttttatggctgcccggaaggcaggagcgggcggtgatgacctgctcctgtttttaaatcaggcgtattttgcatgataaactggaaatggaggggattatgaggatactgagcataacagcccagaaaccccacagcacggggagcggtgtttatcttaccggcctggtaaagggttttgccgcactggggcatgaacaggccgtggtggcaggggtctatgaggaggacgagatgcattttcctgaagggacccgggtctatccggtatattacaaaacaaaaagcctgccctttcccatcgcgggtatgtcggatgagatgccttatgagagcaccatatacagccggatgacagaggatatggtggacgcattcaaaagggtatttctggagaaaacaagggaggcggtggaatgcttccggccggatttgattctgtgccatcatctgtatctgcttacagcagtggtgcgggaggcatttccccaatataaaacagcagccatatgccatggcacaggcctgcgccaggtaaagaagaacagccttgaacgggactatatcctggctcacataaaggaattggatatggtgttctgccttcacagggaacagagggaagaaatcagccggatatacggcgtgccgggagagcggctggaagtgattggaagcggatttgatgattccattttccgctatatgccggttcaaaaggagaatggggtcaagcggctgatttacgccggaaagctgtctgagaagaaaggtgtcatgagtctgctgcggagccttacgtatctggaacagctgcaaagaaaggatggggagcagcaaggacagggcataggacagcccgcggctcctatgaaaatagaggtatggctggccgggggatatggaaaccagctggagtatgaaaccattaagaagctggcggaccagtccccttacccggtgaaattccttggaaggctggaccagccccagctggcagaacggatgaatcaggcggatgttttcgtgctcccgtccttttacgagggtctgcctcttgtggtgatagaggctctggcctgcggtctgcaggtggtctgcacagacttgccgggggtcaggccctggctggaggaaaatatcggaacatgtgccgtgaaatttgtgcccctgccagctattgtaaatgcggatgagccagttgaacaggagcttccgcagtttgaacggcgcctggctgaggcgatagctgaaagcctggaagcggatggaagcaggcagggagcggatggcagcaggcagggagcggatggcagcaggcagggagtggatagcagcaggcagggaccggatagcaggccgccggaaacaccgggcggagaaagtttggccgcagcgggtccgtcgatagcatccccgctgcccgatttgagccgcatatcctggacaggcataagcaaaaagatattagaatcctgcaatcttatataaatcacccaaaatctggatgaaaatgggagaatcataccctgtttcctggaaaaatcgacctgaagtgggagaaacttgcaattttcgccattttggagtatgatgaaaggaaattaaaacatgagggggctataaagcccgaaagagggtacgatatgggtagaggacgcagccgcgggccatacggcggccgccgacaggggcttacgggaaaccagctgaagattctgggaattgtggcaattctaattgataatataggagcagtggtgattcagggagggattcttcatggaacagacagtgctctttatcatgcagtgctgctgacgccttccgggcattactgggtgatagcaggacaggtctgccgttatgtggggagactggggtttcctatcctggcatatctcacggcagaggaatttgtgcgcaccagggaccgccggtggtacgccgtcaggatgctcctgtttgccctgttgtctgaagtgccctttgatttggctgtgtaccataccatgtattatccccactatcagaatatgatgtttaccctgtttgccggggtgctggttatggctgtcatggagtccacccagaatccgtgtttgaaggcaggggctctggcagcgggatgcgcgctgtcttgggtgctgcagtttgattataatgtggtgggagtcctgttcatagctgccatgtactggttccgccgcagtgatacggcccaggtggttgcgggagtggcaatctgcgcagtggagagcatcagctgctattgtgtgtcagccttgtcttttgcgcctattgtattgtataatggaaggcggggggcatttcagcttaaatatatgttctacgtgttttacccggtacattttctggtgctgtacggtgtgagcatgtggattgcaaaaggagtttaaaatcatgatatttgacacacatgcccattatgatgatgaggcatttgatggggaccggccggaacttctgggacgtttgaaagaagccggcgtgggtgcggttatgaatgtagctgccagcctggggagctgccgaagtaccctgaagctggccgaagcctatgactggatatacggggccatgggagtccatcccagtgagacaggggagctggaccaggagggcctacagtggattaaggaacagtgtggccgccggaagataaaggccgtgggcgaaatcggcctggattactactgggaggaaccggcccacgatatacagaaaaaatggtttgaggcacagatggatttggccaggcaggttaagcttccagtcatcatccacagcagggatgccgcaaaggataccctggatatgatgaaggcggctaaggccggggatatcggaggcgtcgtccactgcttttcctacaccagggaaatggccagggagtacctgaacatgggatttttccttggaatcggaggcgtccttaccttcaacaatgcaaggaagctgaaagaggtggtggagtatatacctctggagtccattgtattggagacagactgtccctatctggcgccggtccccaaccgcggaaagagaaactcatccctcaatcttccctatgtggtggaggctgtcagccagcttaagggagtggacccggaaaccgttgtgaaggtgacctgggaaaatggaaaaaggctctaccggctgtaggcagcccggttatgggaaacagagttgacaaatagacaaaaagcgctgtagtgtacgatatacagcgcttcttttttgactgttcttttgcccaggcattgacttttggacgggaatccattactcttaaaagagggccgaatccggtccgcagaaaggaaattataatacatggcgactttgggtaatccgaaaaataccattgaaatcatacagaaatatcagtttgcattccaaaaaaaatttggtcagaattttctcatagatacccacgtgctggacaaaatcataagtgccgcagggattaccggggatgactgcgtgctggaaataggaccgggaatcggaaccatgacccagtacctggcggagcatgcaggaaaagtggttgcagtggagattgacaccaatcttctgcccatactggacgagacattaaagggctattccaatgtgacggttatcaacagtgatatcctgaaattagacatgaaccagctggtggacgagtataatgatggaaggcctatcaaggtggtggccaacctcccatattacatcaccacgcccattatcatgggattgtttgagagcaatgtgcccattgacaatatcactgttatggtgcagaaggaggtggcggaccggatgcaggtgggacccggctccaaggactacggcgccttgtccctggcagtgcagtactatgcaaagccttatatcgtggcaaatgtaccgcccaactgctttattccacgccccaatgtgggatccgcggttatccgcctgacaaggtataaggaaccgccggtacaggtggacgagccaggtgtcatgttccggcttataagggcctcgtttaatcagcgcaggaagacgctgcagaacggattaaataactcgccggaggttccgtatacaaaggagcagatagcggttgccattgagagccttggtgttcctgcttctgtcaggggggaagcattgacgctggagcagttcgccggcttgtccaattattttacccgcacagcgggaaatggggtttaaggttcgcaatatgatgccaggaatacaaaaacggggtccgtggtgtatttcacggggataaaggggaataatcctggaaggacaattatctgaatcatcagagaaattatatataaaacagaaaggaaggtaagtcgatgaacaaaaaagtgggtaaaatcctgacagctgcggcagcaggagcagcagtgggcgtggcagtgaagaagctgcaggacagccggaaggaaaaggaagatgagaggattgccgccattgaggaagcggtgatgaataaccgggattatggcgacaggaaagcttatctggtaggcggaggcctggccaccctggctgccgccgcgtatctgatccgggactgcaggttccctgccaaccagataacggtttacgagggcatgcacatacttgggggaagcaatgacggtatcggtacgccggagcagggctttgtatgccgcggcggacgtatgctcaatgaggagacctatgagaacttctgggagctttttggttccattccatccctgcgccagcccggacgcagcgttacggaagaaattctggagtttgaccatgcccatcctacctgcgccaaggcaaggctggtggataaggacggcaacattctggatgtgaaatccatgggatttaaccaggcagaccggatggcccttctgaagctgctgatgacagatgagaaaaagctggacaacctgaccatccaggactggtttaaggaaacaccccatatattcgagaccaatttctggtatatgtggcagactacctttgcattccagaagtacagcagcctgtttgagttcagacggtatatgaaccgcatgatttttgagttcagccgtatcgaaaccctggagggagttaccagaactccgttaaaccagtacgacagcgtgattcgtcctctggagacttatctgaggaaggccggagtcaacttccgtgagaactgcgaagtgacagatatagattttgcggacggacccggaattacggtaaagaccctgtatctgaaaaagaaggtggagagcacagatgactcaggtgaggaatcagacgctccggccggtccttcctatgtgacggaggaggtccagctaaataagagcgatatctgtatcatgaccaatgcgtgcatgacggacagcgctaccctgggaagcctttacaaacccgcgcccgcacctgagaagaagccgatcagcggtgaactctgggccaaggtggccggaaagaagccgggcctgggaaatccggagccattctttaccaagcctgaggagacaaactggctcagctttactgttacctgcaaaggcgatgatattttaaagaccattgagaattttaccggcaatgtacctggcagcggcgctctgatgacctttaaggattccagctggcttatgagcagcgtggttgcggctcagcctcattttgtgaaccagcccgccgaccagaccattttctggggatatggactgcacacagaggccattggcgattatgtaaagaagcctatgaaggattgtaccggccaggagctgttaaatgaatatctccatcatcttcatattccggaggacaggattgcggaactgatgaagacggttatcaatgtgattccctgctatatgccttatgtggatgcacagtttgagccgcgcaagatgagcgacaggccgccggtgattccggcaggttccaccaactttgcaatggtgagccagtttgtggagattccggaggacatggtatttactgaggaatattcggtacgcgctgcgcgcattgcagtttacggccttttggatgtaaagaaaaagatttgcccggtgacgccttacaacaggcagcctaagattcttttgaaggcgcttaagaaatcatatctgtagcggggcatatccatcatatgattaaatatcgggccggcagaagccggcccggacttttgcaatacatacaggcggagtacatacaggataggagacaataccaatgatatttataggaggaatcagtcaggggcagaaaatactggattatgtaaagactgtcatatgtgaccggtgcggcggatacgggcgataccaggtttacatgacctatatgtatttcagctttttctttattcccctgttcaagtggaataagagattttatgtaaaaatgtcctgctgtgatgctgtctatgagctggaccaggaggtgggaaaggcgctgcttcacggccagcaggcagatataaaaagttccgacctgacgttggttcaggaggggcgccgcaggggctattacgacagcggaacctataagacctggaaaaaatgcggaaattgcggatttgagacagaagaggattttgagtactgtcctaaatgcggcaggagactgtgacggacggcgg

SEQ ID NO: 3447 - DNA, 1563 bp, Unknown
  gut microbiota DNA sequence
tggctcttctggtatagtataatggaatcagcctttacgggcatctgatatttggagaggtgtcggatgctgcaatggttagcagccattgcataagagaaaggatgggaaaatcatggaaaatcagaagatggatttgatccttcagaagttaggagggatcgaaggaggccttgcctcggtaagcgaagatgtgcggtcgctgcagggagatatgcagacactcaaaggagacgtgcagacgctcaaagaggatgtgcagacgctcaaagaggatgtgcagacgcttaaagacagggtaaccaacatagagattaccctggagaatgagaccaacaggaatatccagctgatagcagagggacatttgaacctggctcgaaagctggatgaagcgttaaaggaattacagcctaatatcatgtatcatttaaaagtgaatcacctggatggcgaggtcaccaagatgaagcgtatgttgaatatggcataaaacggataccggcatggaatgccgcagttcagttttcacggttcaaatttcataacaatttcagcaaacaagagaggattttgcaaggcagtaaccagctgcattgcagaatcctttttgcgtttttggccctccatacaagctgtatccatagccgcgtatgggaaggaccaggaaactctgcctgtttttacctttattttacgcgaacctgcttttggattttacctggataatttagaatttataagtagatttgggagagagaaaggaacggaaatggcggatatttcactggtaaatgtatgtaaaacctataaagggggccaaaatgcggtcaaggattttaatttggatatcagggaccgggagctgattatttttgtggggccgtcaggctgcggaaaatccactacactgagaatgattgcaggacttgaggatatttcctcaggggaattatggatggatgactgcctgatgaacatggtcgaacctaaaaaccggaatctgtccatggtatttcagaattatgccttatatccccatatgacggtgtatgagaacatggcctttggactcagggtacgcaggaccgcgcccggtgaaattgatgccagagtaagggaggcagcccgaattctggaaatcagccatctgctggaccgcaggccggctgcattatcaggaggacagaagcagagggttgcaatcggaagcgtgattgtgagaaagccaaaggcttatcttatggacgaacccctgtccaatctggatgccaagctgagggcacagatgcgggtggaaatagcaaagcttcacaaacagcttaacgccaccatcatatatgtgacccatgaccaggtggaggccatgactctgggtacccggattgttgttatgaaccagggaatgatacagcaggtagcacctcccgcagagctttaccggaatcctgtaaataaatttgtggcgggattcattggttcccccactatgaattttctggatgtggatgtgctggaagaggatgggacagtctggcttctgggacagggatggcggcttcc

SEQ ID NO: 3448 - DNA, 4137 bp, Unknown
  gut microbiota DNA sequence
aatgacagcgggtggattggagttcacataagtgtcagggaaatgctgggaagcgaggtgctgcttcacggcaatacaggggatacgggccggctgtcggccaggatgccggcgtcctgccgggtgaagccgggagaattcctgcgcctttacgtggatatgcctcagattaagctgtttgatatacagtcagaagaaaatattttatttgattaggagacagtgatgaaatcagattcattattaaaaaaggcagggccctatggatatattttaccggctcttctggtgtttgccgtatttctgttttacccgtttttcaagaccatttacctgagtctttataagacaaataaaatggggcaggccaagctgtttgtgggactgggaaattatatggagctgtttcagtcggaatcattttataacagtctggcagtaacccttctgttcgtggcaatcgtggtggcggggagcatggccctgggactcctggcagctgtcctgtgcaataaggcatttccgggaatccgtatattcagcacggcttatgcgctgcccatggccattgcgtccagttccgcagccatgatatttaaaatcatgcttcatccttctatcggtattgtaaacaagctgctgggacttgatatcaattggattaacgaccccaaatacgcgctcatatgcgtggccctgctgacagcctggcttaacagcggaattaacttcctgtatttcagcgccggactcagcaatattgatgagactatctacgagagagcatccgtggatggggccaacgggattcagaaatttttccggctgacactgccgggtctcagcccaatcatgttttataccatcgtagtgaatatcatccaggcattccagtcctttggccaggtgaagattctgacccagggcgggccgggggaatccacaaacctgattgtgtattccatttacagggatgcgttttttaactacaggtttggcagcgcggcggcacagtccgtcatactgtttgccatcatcatggtcatgacgcttatgatgtttaaggcagagaagaaaggagtcagctattaatggaacagacaatgaccataaagggacgcaaaagagtcagccgcgaggaaatcattaaagtacaggagaaagccaacagaaaagccatgactgtaaggagagtcaggaccggagccctgattgcagccaatgtgctggtatccctcttcgttcttctgccgctgttatatgcggtcagcgtggcgtttatgccgcccggcgaattgtttaccacggaaatgaatctggtgcccaggcagcctacatgggacaatttcaggcaggccctggtaaaaataccgctggtgcggtttgtgtgcaactcctttatcacagccgggctgattacagcgggacagattatttcctgttctttggctgcattttccttctccttcctggagtttaagggtaaaaacgcactttttatgctggtaatggccaccatgatgattccgggagaggccaccatcatatcaaattatctgacggtgagccggtggaactggctggattcctaccaggtgctcattgtgccctatcttacgtcagcaatgggaatctttctgttccggcagttttataaatcatttcccatctctctgtatgagtcggcaaagattgacggctgcggaaatctcaggttcattttccgcatcctgcttccgcttaccaagtcggccataggagccatggcggtgtatacctttatcaatgcctggaacatgtatatgtggcctttgctggtgaccggctccaatgaaatgagaaccgtgcaaattggcatcagcatgttaaacagcgtggacgcccagtccattactttgatgatcgcaggcgtggtcatgattatcctgccctccatttccatcttcatattggggcagaagcagctgatacgggggatgttctcaggcgctgtgaagggttagaaacacccgaaaagggattactgaagcaaataaaagaagaaaaagaaataagaaaatgaaataagaataaaaaataaacggaggaataacaattatgaaaaagagattaatcggttatgctgcagccttactggcagtatccatgctggcagggtgcggcgcgccggcagcaggcacgggcgctgcggccgacccgggttcccaggcaggtgcatcccagtcaggtacatcccagacagatgtctcccaaagtgcaggtgcagagggcgcttccatcaccttctggcattccatgggcggagtgaacggagaggcattggagtatctggtaaataagtttaattcagaaaacaccatgggaatccgggtggaggcccagtatcagggagagtatgacgatgccatcaataaactgaaaagcgcccagattggcaatatgggtgcggatttggtacagatttatgatattggaaccaggttcatgattgattccgggtgggtagtgcccatgcaggagttaatcgacgcggacggatgggataaaacacagattgaacctaacatcgcggcgtattatactgtaggtgacaccttatattccatgccctttaactcatccacgcctttgctgtactacaacaaggatatgtttgacaaggcaggcattacacaggcgcctggaagctttggtgagatcggccggattgccgatgatttggtgaacaagggcggggcaggagaacctatatccctgagcatttacggttggttttttgaacagtttacctgcaagcagggactgaattatgtaaacaacggaaatggacgtgaggcagctgccacagcggttgaatttgaccagaacggagctggggcaaagacactggcggcctggaaggaactgtacgacaagggctacgcgcccaatgtgggcagaggcggcgacgcggggctggcagatttcagctccggcaagtcggccatgacccttggatccactgcctccttaaagcagattctggaagatgtaaatggcaagtttgaggtgggaaccgcttatttccccatggtcagtgaaagcgataaaggcggagtgtctattggaggcgcctctctctgggccctgaacaatgaggatgaggctaagaaggccgccacatgggagtttgttaagttccttgtttcaccggagagccaggcttactggaacgcccagacaggatatttccctgtgactgtcaaggctcatgaggaacctgtattcagggagaatctggaaaaatatccccagttcggcactgccattgaccagcttcatgattccgctccgcagtcagcaggcgccctgctcagcgtatttcctgaggcaaggcaggtggttgaaacggagatagagaacatgcttaacaacggaaccagcccggaggaggctgcatctgagatggcgcagcagattaataaggcaatcggggaatataacctgctcaatgaatgataatcatggattggagggtatactgagtatgaagacacaggtttgggcccacagaggcgcgtcggcttacgcgccggaaaatacgctggaggcattccggctggcagcggaaatgggagccgacggggtggagctggatgtccagttaagcagggacggaaaacttgtggtggcccatgatgagaccatcgacagggtaagtaacggcacagggtatataaaggattataccctggcccagcttaagaaactgtcctttaacaggctgtttcccgactttaaggacgcccggattcccacgcttaaggaagtctatgaactgttaaagcctgcgggtctgacggtgaatgtggagcttaagaccggcatcatactctaccctgagattgaggaaaaggtactggctctcactgcttccatggggatggaggacagggtgatttattcatccttctgccatcccagcctggtaaggcttaaggaactggacagcggccttaagactgggcttctgtactcggacggctggatagacgcggcagcctatgggcgtcatacagtgggagcggatgccctgcatccggccctgtaccacatgcaggatccggatcttatcccggctgccagaaggcagggact

SEQ ID NO: 3449 - DNA, 500 bp, Unknown
  gut microbiota DNA sequence
ctggacagcggccttaagacagggcttctgtactcggacggctggattggcgcggcagactatgggcggcgtacagtgggggtggatgccctgcatccggccctgtaccacatgcaggatccggatcttatcccggctgccagaaggcagggactggcagtgaatgtatggacggtcaatgaagaaccgcatatggaaatgctggtgcggcagaaagtggacgccatcattaccaaccggccggacctgtgcaggcgggtcgttgacaggtacacagacctatgacagaatttttgacagaaagcaggcatatatgataagactggttgcaattgacatggacggcaccctcctgcgccctgacgggcatatttcagagaggaatgtgcgtgcccttaagggacttaaggctgcaggggccgagttcctgatttgtacgggacgcagctatatagacgcattggaaccccttaaggaggccggactcagggcgcctgtgg

SEQ ID NO: 3450 - DNA, 514 bp, Unknown
  gut microbiota DNA sequence
tgctgtgtatgattgggacggcaggctcatggacgagatacggctttatgaaaggcaggtaagggaaatcctggaatgctgccaaaaggaggacattatctttgatttcatgacggacagaggcagctataccactgcaaaggaggcacagttccgggcatgttttgagcggaatgtgctgcttcccatggcggagtttacctatgagggagtgagagacaggttctcctttgcagaggaaggacagctctttgagctggggctggcattttataaaatatcggtcatccatgaatcacaggaggtcctgggcagaattaaggagcgtctgtcccgtatacaggaactggcggttgcgtcctcttttgccaccaacctggagctgacccacagccatgcccaaaagggccgggctctggctctttacgcggcctccaggggtgtgagaccggatgaaatcatggccataggagacagcgagaatgactattccatgctgtccatggacataaaa

SEQ ID NO: 3451 - DNA, 2407 bp, Unknown
  gut microbiota DNA sequence
gcttaaaggacttaaggctatgggagccgagtttttgatttgtacgggacgcagctatatagacgcattggaaccccttaaggaggccggactcagggcgcctgtggtgtgcatgaacggagccgctgtgtatgattgggacggcaggctcatggacgagatacggctttctgagagacaggtaaggggaatcctggactgctgccaaaaggaggacattatctttgatttcatgacggacagaggcagctataccacagccggggaggcacagtttagggcatgttttgaacggaatgtgctgcttcccatggcggagtttacctatgagggagtgagagaccgattctcctttgtggaggaagaacggctctttgagctgggtctggcattttataaaatatcggtcatccatgaatcgcaggaggttctgggcagaattaaggagcgcctgtccggaatagcggaactggcggttgcgtcttcctttgccaccaacctggagctgacccacagctatgcccaaaagggccgggctctggctttttacgcgtcctccaggggcgtgagaccggatgaaatcatggccataggagacagcgagaatgactattccatgctgtccatggacataaaatatacggttgccatgggaaatgccatggagagcattaaacgtatcgccagatgccagacccgctccaatatacaggatggtgtggcatatgccatagaaaccctggttctaaccagggaggccagggcgtattaggcctctgagtgatggggcggagcataattttacaggtgataagcaaagagtccgcaggctctgccccggctctttttttattgtattcagaaggtatgtgagagtttgaatgattacggattgacaaataaatagtccggtgctatgctaaatgacaacagggagcttgtgaagcaggctgagaggaagtaatcgaacttcgacctatcgcacctgatttgggtaatgccaacgtagggaaatatgagacatgtatgtgtattcaatgcataatgtaagtccatatcccgcgcggtatgggcttttttatatcagagaaaagttccggccttttgcgcggtatggacataagcaggatttaacgctgtgcaggaaatacgccgctgtaccagaaaatatgcctctctaccaggaagataggcgggctccaagtaaaaaacatggaggtatgactatgaaagtaaacattaaaaaactggcggtaagcgccatgctgacagcggtggccgtgtctttatccggcttttccatccccataggggcatccaaatgttttccggttcagcaccttgccaatgtactggccggtgttttccttggtccgtggtatggcgtgggaatggcgttctgcacatcatttatcaggaatctgatggggacaggcagtctgctggcatttccgggcagcatggtgggcgcatttttaggggggtatctgtaccagcgtttcggcagactgacactggcctacgttggggaggtgttcggcaccggcatactgggcggaatgctctgctatccggtagccacactggtgatggggaaggaagcagccatttttgcctatgtaatcccatttcttatgagcaccatgtgcggtacgatcattgccgcgttcctgattggcgtgctgtataagtccggggcgtttcagtatatgaggcggatgctggatctggatgtacagaccggcaaagccatgggaagataacaagaaaaaggataaatcagataatgcagagacaatggatgaaggacttaagggagcgctctcccagagtccactgtataaccaattatgttacggcaggggacgtggccaatatggtcctggccgcaggcggctctcctgttatggcccaggggctgcatgaggtggaggatgttacctccatctgcagcagccttgtccttaacctggggaccctggaagaaaggaccataccggccatagaggcagcgggaagaaaagcggccggcctgggccttcccgttatcctggacccggtaggagtcactgcatcacggtttcgcagacagacagccattgatataatccggaagacatccccttctgtgatccggggaaatgaggcggaaatccgggccctgaaccaggaactgagaggacatgaggcgggcaacacctgcggtgtggattcggaaacctttggtaccattgagagccgcatggaaactgcctgttccctgagggaccttacaggcgcggttgttgtcatgaccggggtagaagatgtggtggccggaaaagaaaaaaagttcattgtcagaaacggccatccctggatggccaggattacaggcagcggctgtatgctggacgggcttatggga

SEQ ID NO: 3452 - DNA, 181 bp, Unknown
  gut microbiota DNA sequence
tgacaccacaccggttacaggggagactaccactaaggaaatcgtggagaagatgctggggcgcaagttcgaggagaacttcccaaaggaagcctgccagattggagacgtgctgtttcagacagaacacttatccggcgcaggcggcaaggtaaaggacgtgtccatacaggtgaaaaag

SEQ ID NO: 3453 - DNA, 627 bp, Unknown
  gut microbiota DNA sequence
agttttttcgtatttcaatttcatatacaaaaaagttccatcagaactctgttcacagtcagtaattttatacttattttctttttcaaaaggtattccttttaattcgccctgctctgattgtggtatgttttcaggattcagacctatattaaacactgcgtaaaagtcgtcaagcgtcttgtctcggtcaaaataccctattccatcttctatacgcaatggaacaaacattgtagttatatcaggattatttaaatgtttctctgtatccgcagccagaagggaattcattaatttctgcctgtcctcatacattaaataccggagctgtccatatgtaaaagacggaacataaaattgatcttcgtataggttcaaaaggccttcggcagcatctttgaaaatctcttcctgatatgaattcaacgaatacatgtgtcgtacaaatcccagcttccacgcaccgtttttatcaactgtatagccgtccggcgtaactgtatcactcagcatacgtcctgtatcatcaaaataatagcactcggcaattctatcgtcattaccatcaatccacatccatgtggatatgggaaatgttccgtctccattatcataccaccatgc

SEQ ID NO: 3454 - DNA, 145 bp, Unknown
  gut microbiota DNA sequence
ggattcgtcaaccaggctacggaactgttttcgccgttgcggccctttacccatgccagtatgttcctgtttctgtcatccattgcagggctggtgtatttcggcaggcacggatggattcgtccgggaggcgtaaagcgtgtgt

SEQ ID NO: 3455 - DNA, 775 bp, Unknown
  gut microbiota DNA sequence
tattattataaaaatattattttcagacggtttcttatttggggctattctgatacaatcattgtggaagagtctttgaggaagtgtttttgggaagaattctaaagcatatataaaagcatgaagaaaggacaggccgcgaatcggtatgcttaataataaaaagcttaagaataacaatattgtcatcatgaattttacgggcgtatatgaaaaccaggaattttaccaggagttgggcgctgtatggctggagcttggagatatacaaggcactaattgttactgtgatgatgaggcagaggcagccatcaaggagagaatcagccttatggaaccctccggaatccacttcctggattccggaaattaccattatgtgagcaaaatatggctggataagatagaggaggaatttgagcttctggtgtttgaccatcatacggacatgcagatgcccatgtttgggaatatcctgtcctgcggcggttggattcaggctgctttggatacaaatacgcgtctgaaacgggtttatctggcagggccgccctccatggaagcagaggctgacagggaacgggtagttggtatcaatgaagaggagctgaagacgccagggtgtatcagccgccatttgaagaactccgggctgcctctctatatatccctggataaggatatcctgacccgctcctgtgcaatcaccaattgggaccagggagaggcgcagctggaggacgtgttggcctgcataaaggaggcggcatcctgc

SEQ ID NO: 3456 - DNA, 302 bp, Unknown
  gut microbiota DNA sequence
ttatgtgaccgcggagaaggatggaaacggagatgtgaatcttatccgtacgaacaacgcgggagcggaagatctgagtgcaataaagaaggtcatcgtgacagtaaactatgagacggatgcggagcagtggacgacggtaggatttgaccgtggggagcacggaacattcagtgcggaagcggatgcaggaaaaaccgtaatcacaatcgagaaccagctgataggaagggacttcccaaccgagccgggaatcacggcagccgagggatgggtgttcacaggctggaacccggtactgc

SEQ ID NO: 3457 - DNA, 6029 bp, Unknown
  gut microbiota DNA sequence
ccggatgcggagcagtggacgacggtaggatttgaccgtggggagcacggaacgttcagtgcggaagcggatgcagaaaataccgtaatcacaatcgagaaccagctgataggaggggacttcccaaccgagccgggaatcacggcagccgagggatgggtgttcacaggctggaacccggtactgccggaaacggtggaagcgggaggattggtatacacagcccagtacgcagaagatattaaaggcggtggagaagacggaaagcagcctgataatatccctgacaaataccaaacaatcttctggtatgagagtgcagataccacaaaaggtactgtaagtgtaacaaatgcagaagtccacacctttagagatgataacggtaactacactgaaaagacagcaataaaccccaatggagcaactgctgatccaacagatggcaatgcattcgattactggacagacaacgatacaaaagattcaacaatcgacatgaaccagttgaaatcgaagacatatttagaagacacaaccttcaccgcatactttgatgcagacgagaagggaaaaggaccagacggaaaagaacccgatggagtacctgataagtatgaaacaatcttcgtatacaagagtgcagatgtaacaacgggtactgtagatgcagatcctcttaaggctgaagtccatgtattcaaggatgcggatggcaattacacagataagaggccagtcaatcccaatggagcaatcgcaacacctctggatggttttgcatttgactactggaccgatagcgaagtaaatgactacactcctgacatgtcaaagatgaagacaaatacttatttggtagataccactttcatcgcatactttgatgttgatgaaatcggtatagaagtgccaaatgaaccagacggagtacctgataagtaccagattaagttccaatatgtatcggaagacacaaatcgcggaacagtatcaggaagggtaactgaagtcaagactgtctatgaaatcgttacaggagaagatggtaatgaccatagggaactgaaacctgcaagtccagatgctaacgtaacagtatccagccttggaagctatttattcaataactggacagacggaagcaggggttatgccaacgcggatgaaattagagctgcagagttcacacagagtaccacgtttaccgctcaatttagatttaacggcggtggcggtactggtcctggcggcggtggaggcggccccagcggtaacaccgaaggcaacggacgctacaacccatcaaccgttggcccgggtaccacaaccatcactccagaagatgtgccgttagcacctcttccggaatcaccagtagatgtaaccttaattgatgacggtgaagtgccgttggcaccactgccaaagacaggtcagacatctatgagaaccacattgaccatgatgttatcaggaatctttgttgcggtaacagcgttgagcaagaaacgtaaagaagaggattcataacagtccattacagtcaatgtaaaacaaaatcgtagtataacaggaacccctggtcaatatggccaggggttcttttacctctcaaatttaaataaacattaagaaaatttccattatctggccgacctaacgcttcctataacgtaccatttgatatgattagtaccataggactaagtatgaagaggagaaaatggtatgaaggagaaaggaagatcaagagcactgcataaaaaaccttacggtttatgcaaaagatttcttgctgccatgattgctgcggttatggttaccactaatattggtacagaccttacgacagcgtatgcagcggaatcttctgacagcgtaaccttcgagatgagcggttccggcctggttaccgcaattgaagaagcaattgctgcaggaagtccccttcaggagggggatattgactttaccaacggcaagacagaacagtttgaggcattattttatggtgaaggaaatatatatgagatttatccggaatacgacggaggagacatggacgcggagctgcgtgtatttgtccggcttccggaggatgcggatgacatgtatatggtcaccggagatgaggaaattatattcctgtatgtgaataatggagaaagctccatcagctgttccacgtccatcaccagaatggaggatggaaaggagaaggtaaagagaacaaagaaacttactgttaaaagctacgaggctgcatttggagatgaggaagtaaatatcatatccaagccggcggagacggtaccgtcagaaacaggaccgtcagaaacaataccagcagaaacaataccagcagaaacagaaccagcagaaacagcaccgtcagaagagattccaacagaagcagttccgtcagaacctgacccattggaaacgacttcgtcagaagctaatccagcagagtcagaaccggcagaaccaactctggaagaaaccacagaacagacctctcagagtcaggagacacagacacctgcaggagaggaaggacagaaggaaacaactgcttcaccaacagaggggacagacactggcagacaggatacagaagaggctcaaaaggaatcagagggctcccggcctgagaatacagataagtccgaggaaatatacaataacgcaaaagaagaagtagaacagaagggcgatgcagataaggagcagattcattctgagaaacaggatgatacacctgttgcatccattaaccgtcactatgcgcctgttgttgctgtaaagacaggtgatgagacagcctcccttcctgaaaagcatgattcagatgtgagaattgaagagggcacaaaagaaaaagaagaaccaaaagaaaacgcaaaagcagacaacacaacaaaagagactgctgaaaatcaaggcagcagtgcagataaaacatctggaaagacaaatgtgtccagtgagacgggaacatccggaagtaaagaatcatcaagtaatccggaatcatccggtaaccaggagtcatccgccagtcaggaatcatccggcaatccagagtcatccggtaatccggagtcatccggtaatccagagtcatccgctaatccggaatcatccggcaaccaggagtcatccgccagtcaggaatcatccggtaatctggagccatccggcagctcagagccatccggcaccccggaatcatccggcgaggcagaaacacccagccagccggcacaccccagcggctcagaaccgtctggcgaatctggtgatagcgaggaaactgaggaggggaaaacagaagagtcctctccggctgaaacaacgggagacatcataaccgatgaaacacctgtgattaccatagagacagagccatcccggacaccggaggaaacagaggcagaagacgtccataaggtgaaagcagccacatccgatgaccttgtgggaatcgggtactgcagcacggccagggtttataccacaacggtcaatacgctgaaagcattgaatgatttcgagggttataaggtaacatatgctgtctattcacagggaacagcccgcattgtagatggaccgcgcggtattgaggaaggcggaagccttacatttggcgttaaaacccaggttggctatgatatacagtcagtatcggtcaatggtgaaatcttagaggcgggagtctcgggggattcagctgacccggattcagcagatccggggaatttggcggaagatatctcctggttcaccatagaggatgtgacggatgaactggagattgaggtatataccactgaaacagacgaacatccggaattttctgataccattgtggtgaatgatggtatgattataaacctttacgcgcctgaaggcgtattgccaaaaggcgtgaccgcttctgcggaacgggtggattctgctcttgaggattccatacgggaaaatgcccaggaagctgcttctgaagagggaaagcaggtttcatcagtggctgcttatgatataaatttgtggcttggaagccagaagctggacgctggaatctggaaccaggaaggcgctgtgacagttacattttcaggaattcctgtagaggaagccagccagactgccgaagaaatgtccattgttcatgtggagacagaagccgcggatgtgaaggctttagaggaggtccgggacgcagtggatgtgtccggcggcagagcggtggatgcgttaagctttgaggcggagcatttctccatctatgcggtaataagcaaagaaaatataaccaggactaccgtggaagtaagtaaggacgagacgttccgggtaaaagcagacagaagatatggaggctcatggttcgtatcagatccaagggtggtttcaatccaaaacgtgaaggatatcaatgagaatggaaaatggtattcagcagcggatgttaaagcgctgaaagccggtaaaagggccagtatatggtacggaaacgtagtgcacagtgaatatttcaacatcattgtcaatgaagcagccaaccagttccatttcaaattcaaccaggattcctccaacatatcattatggtacagcatcaacggcggcggactcatggagatggaaagaggacaggtccttcagactgacagaacagacatggtgtccttctatgtaaaaccggccaccgggtatgtgactcctaccacctttgagcacagaaacggcaggtccgaggcagagctggcaaaagcacggtttggagaaggcatctatgtggatattgcagacgcgccctcaatcatctctacagagcatacaagcagagatttttcggatgcaaatgcggaagcggtatccataggctgtaccaaccagttccattactcttacagggatgatgcttaccaatacagggaatttaaaattcaggcaacgcctgcaaagattaagataaagtatgacggcaatggagcagaaggaatggctccggttgactatagaacctatacccatccttcaatcaggaatggaaacagctatattgatatcaagggttcagggaacctgaaaaagaatcattttgattttattggatgggaactggctgagacaaatgtgaatcaggccggcagtaagatatatcagcagggtgacagtctgtttgtaggtgatgtttggaaggatattaatataaatcctgttacctatgtcctcacagccaaatggatgcccaagcagtatacgcttaccactgcttccgacgcaaactctgccattgaccagggcaaacaatatacttacgacgcagattctcttatcagggtaaattttacggccaagcagggataccggatatccggagtcgcggtggatggcgtacatctgacaggaaaagctttggatgaggctgtgctgaacggctgggtggaagtggactgcaaacaggaccattatgtatcggttacttctgtcaggacggaatataaccttataaccagggctgagaatgctgatattactaagggtacaaaatattcctacagtgacacggatacattggatgttaaatttaaagcagacaagggctatacggttaccggcattaccgtggatggaaaatccttcacaaaggatgaaatccaggccatattggccgaggcggaccagcagggttacagtcatttaacactggaccgtaagcaggaccacacagtgttcgtcaaggcagataagacactctatacattgacggccagggcagatgaaaattcctggattaaccctcagacaaagagctatgagtacaaagagttcatcatgtataaggttaaattcggggcaaagaaaggttaccagatacagaatatcattgtagatggaaaagaattaagcgggtttgaaaagacagccgccatagcggccggggcatacctgtttgattataagagcagccataccatcgaagtgaccaccaggataaacagttatcattt

SEQ ID NO: 3458 - DNA, 205 bp, Unknown
  gut microbiota DNA sequence
agcttatttccggttcctgcagcctgtgaataccggttttaagcggctggtgctaaagggactgaatccggggaccatgtaccgggtcagcggaatggactatacctcgtacggggatgaactaatgagtgcggggctgattctttcggatggggccagcggcgtacggaccagtccggtgccccagggagattatctgtcccgg

SEQ ID NO: 3459 - DNA, 300 bp, Unknown
  gut microbiota DNA sequence
tttcatccaatatctttatggcattaaaagcatgcgccagacggtaaaagagattgaggtaaatgtcgcctatcgctggttcctcgggttggatatgctggataaagtgccacatttttcaacctttggaaagaactatacgagacgctttaaagacaccgacctgtttgaacagatattcgcgcatatcctttctgaatgctacaaatttaagctggtagaccctaatgaagtttttgtggatgccacccatgtaaaagccagagcaaacaataaaaagatgcagaagcgtattgctca

SEQ ID NO: 3460 - DNA, 627 bp, Unknown
  gut microbiota DNA sequence
cgtaacggacaaatacaactccacgcttctgatactcctggtcaaactcattcagatagatgtttgccagcaatgggggggtatttcctccttgcggcgaaccttcttctgtttccatgactactccgtcttccatcacgccactcattaagtacctcttaatccactggattaccctttcgtccctcacatttctgcgcaggatattcaggagtatctcatggttcagggtatcaaagtatttcgacaggtccaatgctaccccatggatatatccctgctctgcatactctttcaccttctgaatggcatctttcgcgcttcttcccgggcgataaccgtaactgttctccgagaacaacggctcgtagaccggtgtaaggcgctgtgttatggcctgttggaaaatgcggtcttttacggttggaatgcctagctttcgtattccaccgtctggcttgggaatctccactcgtcttaccgggtcgggggtatactttccccttctgattctctcgataagttctttctggttttccctcaggtatgcgcctatttcctccacggtaatcccgtcgattcctggcgcccccttgtttgcctttactctcttaaaagctctgttga

SEQ ID NO: 3461 - DNA, 290 bp, Unknown
  gut microbiota DNA sequence
ggatgcgtggcgcctgcgcgtcctcaggcatccgctcctctggcaaaggaatccgctgcccaggaaagtacccagtcctatgaacaatatgagaagaaaaccattgatgcccaggcgtcctttgaccagctgaccaacgacctgttcctggacgaagttgacaattcccttatcacgcttcactacaccctggccaatccggccgcctacggcatcactgactacgataaaaccctgggaaccgtatccctggaggacagtaaacaggctcttaatgatgcaaaatccct

SEQ ID NO: 3462 - DNA, 8460 bp, Unknown
  gut microbiota DNA sequence
gagctctacgaccagcctctttcctcctccctgggcatacaggcgcagcttcccatacttctgtccgagtatgtattttacagtaaacaggatgtggaggattacctttccctcctgtcctccattgacacctactatgacagcatcattgcctttgagaaggaaaaaaccgatgccgggctggggctgtgcgacacggtcatcgaccgtatcctcaattcctgcaacgcctatcttctggacgcggaccacagcttcatggcggaaacatttgcggagcgtctggagcaggtggagggactgacaaagcaggaaaaggaggatttcattgccaggaaccatactgccattgacgaacacttcgtgcccgcataccaaaagctgatcgaggggctgactcccctgaaaggcaccggaaccaatgataaagggctgtattacttcccccagggcaagaaatattaccagtacctggtgaacgcatataccggcacttcctatcaggatattcctgccctgaaaaaagccatgagcgatcagatgatggatgacctgactgccatggatgagctgctgaccgaaaatcccaccctggcaaaaaaactgtactcctactccttcgccctcaccgatcccaaccagattctggaggacctgaggaaacagtgcgcaaaggatttcccggccatcgaggattacacatgcagcattaaaaatgtgcccgctgccctggaggccaccctgagcccggccttctacctgaccgtgcccattgaccgcccccaggacaattccatctacatcaacaacggaagcaccaatactgccaggaacctgtactccaccctggcccatgagggttatcccggccacatgtaccaaaccctctatttcaacaaacataacacctgcaacctgcgcaagctcctgagcttcagcagctattcagaaggctgggccacctatgtggaatactattcctacagcctgaacaacggactggacccggacctgggagagctgcttcagcacaatgccgccttcacccttgccctgtacgctattctggatgtgaatatccactatgagggctgggatatcaagcaggtggaggactatttaaaccactacttccgcatcagcgattcctctgtcattaccaccatctattatgacattgcggagaatccggccaattacctggagtattatgtgggctacctggaaatcctgggcatgcagcgcgaggccaagaaaacccttggcagccgctataccaacatggaattcaaccgcttccttctggatataggcccggctcccttcagcgtcattaaaccatattttgcggagtggctggcgcggcaggatgaggccgggagacagaatacggaaagccggaattgatccccgtaatttccgccgcagcgcaatatcagcaggcccaaataaaaagtaataataaagcaggatttccctcccttccaaagggcggaaatcctgctttattatattaagtccccattatatgaaaccgcacacatcaacgctctttcttcctgcgcttcaatttccccataacagacaatcctcccgcaacccctgtaaaaatccccaggagtacggatgcacggataagtccgggaaatacctgggcctcggtgagaagcccggactccagtcctctcaggctgcccagaccattcagaccggaaacggcaaaggcaagtccccaacggtacagccacatcagaagaatcagcgggataaccactcctgccgctcccataacaacagcctccgccataaaaggaattttcacaaagccttcccgcgctcccataaggcgcatgacccttgttttctccttttgggcctcaatgcccacagacagggtattgtgaatcagcagcactgatatcagtaccagcagcaccgcgcttcccgcaatcaggcgggccgccccctggcgcagctttaaaagcgccatgaccgtatccgctgaatgggtgatttttctcacgccttcaatgctctgcacatactccacaaagccttcctggctgcctatccggtcaatatatacctggtagttcccactggaagccagcggattatccgtttcgaagattccgtccaatgcctccgcattctcgtaatatttctctttaaacccgctccaggcctcgtctgccgacacatacacggtccgcagcacttccggacggctctgaatcaggtttcctatctcttccacccgctccggcagtattccctcatcaaaaaacacagccacatagacttcctgctctgtcttttttaccatgctgtccacattggctgccgccagataaaacaggccgaacagaaaaatacaggccgacatggtaatgacagacgccgccgtatacactctgtgatgccacagatttttaagccccagacggaacaggtagagcaatgtcctaatacccatatgccgctgcctcccttgcaaggtccctggccacctgtcctctgcgcagcaccacctgccttctgtgcatgctccttaccagctcctggttatgggaaaccaccagcactgttgtcccctggccgttaatccgctccagcaggcgcatgatatcctctgcgttcttctggtccagattgcccgtaggctcatcggccagaagaagcaccggccggttcacaatggccctggcaatggcggtacgctgtttttccccgccggagagctggtccgggtagtactttgccttggaaccaagccccacctgattcagcacttccataaccctgcgcttcatggttttgtaatccgcctccacgacccgctgggcaaatgccacattctcatataccgtaaaatcagaaaagagccggaaatcctgaaataccatccctatataacggcggtactggtaaatctgacgttctctgaggcctgccagctcaatcccattgacctgtatattcccctgggtgggatcggtctcttttaaaatcagctccagcatagtggtctttcccgcaccgctgtccccctccagaaacacaaattcccccctgccaaccttaagactcacattatccagggccttttgcccgtttccgtatattttagtgaccctgtcaaagaaaatcatactgttatccactgcaaacctcatttccaggaaatttatccacaatcacatgtcctttttctggagtttatagacaaaggcaagtatcttagccactgtctgataatactcctccggaatctccatgtcaacttccaccgtatcatagagtcccctggccaggggcctgtcctccatgatatacacgccgctggcctcagccacctccactatcttaagggccagatgatccgcccccttggccagcaccacaggcgccctgttcttctcggaatcataccccagggccactgcaaagtgggtcgggttacggattaccacatctgcattggggacattctgcatcatgcgcctggatgccatctggcgctgcttctcacggatttttcccttaatctgcgggtcgccttccgtctgcttatactcttcctttatctcctgtttgctcatgcgcagattcttttcatattcccaccactggtaaaggtagtccacggctcccaggaacacaaaggcaattcccactgtgtccaccagggaaaccactgtattgcccacataaatcaaggcagaagccactgtgccctccatgagtcctgtcagctccgtcagtctgcctttgaggaaaaaccacaccacccatcccagcactgtaatcttaatcagggactttaacagttcaatcacagatctcagggaaaacatacgtttaaaacccttaagggggctgattctgtcaaacttgaatttgagcacatcccatgaaaatgccatcctggtctggaaaaaggtgacgataaccgctgtcagcactccgataaaaagcaggggcagggacgccttgaagaacaccagcacggccttcataaacagtcccttccccccttcctgccagaatatatccggcgatgaggcatatgaaaaaaataaatgcatacactccccaaagctctcatacatcatgggcgccagggccttcagggagtggaacagcaccagcagcgagcacaccgctgccacgtcattgctctggaacacatttccctttttgcgctcgtcctgccgccgttttggcgtggctttctcagtcttttcctcagcagccacctgtcaccacttcctctccccatgtattgtttcaatccgcgcccggtcctttaacattaaccggggctatgcccagaacccgtcacccaaacatcataagcagcttctgggcctccgtcatcatggcctctgtataccggtccataaatgcgcccatgggataggcaaagagcatcatcagcatgattcccaggaggattttgcactgtatgttgatgacaaacacatgaatctggggaatcagcttcataagcactcccatggtcatctccagaatgaactccgctgccacaaaaggcagaaccagctttatcaccatgaggaatacagaaccgaacagggttatgatataccacaggatacgccctcccagtatggccccggctcccaccggcaccacctggtagctgtaggcaaaaagacgcaccatggtcagatggcagcccgtggcaaaaaaatagaggtaaaaaaacacgttgacaaactggcccagaatagaggtctggactccgcctgccgggtccatgacctttcccatggccagtccgaacaccgtgtccagaaagtcccctgccacatagagcatataaaaaaatatgtgaaacacacagccaatcaccaggcccagtatgacttctcttataagggactccaccatgtcaaaggtactaaaagccatgacctgtccggctccgcttctgactccgggcgcaatcaggagactgagggctagcaccagcccggtgcgtaccatgggcggaactcctctgcgtgaaaacacggggttgataaagaccagtcctcccattcttgccaggaccaaaagaaaaatatcaaaatactcaaatacactgctgtccataccgcaccactctcatcaaagagctgccataatggcaaacagctccactacaaattcattcatgaccttgctcatccaggaccccagggctaaaagcaccagggcaatgacaatcagcttgggcacaaacgtaagggtctgttcatgaatctgggtggctgcctggaaaatggccaccagcagcccaaccgctatacttatgatgagaagggggcctgcgatttcaaatgcaaccaacatggcctccttcatgatttccattacctgttcagcgctcatacaaattcctcctcagcgtcacctgaaactctggaccagggtcttaatcaccagactccacccatccaccagcacaaacatcatgattttaaagggtagtgcaatcatggtagggggcagcataaccatgcccatggacataagcgtactggacaccaccaggtcgataatcagaaagggaatgaatataaggaatcccatggtaaatgccttattcagctcactgagaataaaggagggtactatggtggtaagccccagcttcatatacccttcctgcccctgggatatatccggcggctgtgctttggatatggacaggaacagatccaggctttttttctcagtctgtttcagcataaattccttcatgggctcctgggcccgctcaaaggcttgttccctggtaatctgcccttcccggtaaggctggtatgcctgggtgttgaccgaggcaattacaggactcatgataaataaggtcagaaacaaggcaagccctaccagaatctggttgggcggcgactgctgtgtgcccagagcattgcgcagaaacgacagcacaatcacaatcctggtaaagcttgtcatcataatgataagggagggaaccacagccagaaacaggaataaaaacatgatatccagcatatccatgggctttcctgtgccggaggacccctgcagggtcagagacacatccgtcgcataggatgtaacagcgcccggcgcccacatccaggcaaaggtcccggcgcctatgattttccctgtctttcgcagtattttactcatgattcttttctcctgcctttttatcctgtctgttcctctgtcccttttcctgaaaatgctccttcatatgggatgacagaagggaaacaaaatccggcgccccctctgtctcccccttcttatcgtaggattccagctcttctaccttggatatcctgcccggagatacccctatcaggaaaatcctctcctgcacctttaccaccagcagatagctgtcacggcccagtgccatctggtccagaatctccatccccccggtcccccgggtccgtcccatgccccgccccagcatcctggtggtgtaataggccagcatcagtaccgcaatcaggacaataaggtaaaacagtatctttaaaaatgccatattattccctcttgcccacgacttcgatgatacgtgccccgaatcggtccccggttaccagcacatcccctctgccaatcagttctccgttcacaaccacatcagccggtgaacctgcctgcttgtccagtaccaacagctgaccctccttaagggaaagtatatcctttacactgcaaaccgtactgccaagcctgactgatacatccagcgttatatccagcagcttctttttttcttcccctatctgttctttggcatacacgataggtgtgtacttaaattccggaaaggacacctcctggacggcaatggcctccttgtgttctgccgtctgcatccctgctgccggcatccccgggggctgcccacctgtctcctgacagggcatgtccgccatatccgaaatacccagcacctgttttagtgcctgggcggcaacaatatatgcatctgactccaccaccccgtcaataacatagtgcagccccattaaaagcacggaatcctccgcattccagctgcgaataatatcctggatcctctctgtgttgtcaaatgccgatatcctggttattgtgtccctcatatcccttcccaggaagtcattgagttcatccatggcagcgcccacacattgggaagcaacttccttcaaggtgctgagggcaatctcatccagggggctctgggcatccaccggcacacccatgatatagttggtaagccttatcatgtcctccttggcaaagatgtacagctggtccgccgacatgccccccacagcttttctgctctctatggccacattaaagtggggcaggccctctgccagggagcccatgtctgtctcctccacctttgacaccgacatcttcacgcttctgcccagcagggagcctaatatattgcatataggaaccgcttccatctccgtcagctcctttatggcttctttgtccattgataacatgccttttcctcccggctacaattctctgctgatttccactgccttgcgcatctttgtctgacccgccctggcctcaaaacaggccacatcctccacatagagggatatggcgctgtccacctttttattgaggggaatcacatcccctggagcaagctgcagtatatcctgggcatccagggtaaactcgtgaagtatggccctcagctcaacctccgattccaacaggtgctgttcaatatagtgccgtttggatttctgtttgtcctcatcctgtttcttatggctgaccgcaaaggaatagccgaacttggaagtgagctcctccacattgggggccggcatcaccatgttgattctggctctcagtttctcaattaccacctccagctccacctggataaccacatcttcctgggcgctcatctgaagcaggtgggggttggtctgaagccctgtcagggatgcttcgatgtccaggtactgtccccaggcttcccctaaaaactcagtgatttttttcaggacatactgtaaaatagccttctcaatatccgtaaagtccctggataaatcatattctgacccgactccgcccaaaagacgttcaatcataaaaaacgccagcctggtatccacttccatggtcagaggcgcctcattataatctttatttgcaggactcatggtaatcatgccaaaaagggaatgatcctgcacagaactgctgaattcctggtaacgcttctccactataccattaatattaatctcgcaaaacgactggagaagacctgtgagatacggcgcaagggcacgggcgaagctgtcatacagattctccaccgtactcatgcgctcctttgtaaatttctttggtgatttaaaatcgtaactcttaatcactggctgttccttcctg

SEQ ID NO: 3463 - DNA, 2220 bp, Unknown
  gut microbiota DNA sequence
gctcatgcgctcctttgtaaatttctttggtgatttaaaatcgtaactcttaatcactggctgttccttcctgcatcatagtctcatcccccggcatggtcaccggaaacaggggatccattgtctccattccctggaccgtatccggcggtttatatccggttccgagaataatcatatccacccgccggttctgttcgcggccttccctggtggtattatccgcaataggataatattttccgtaaccgcggcatatcagcttttttggggggattcccacctgttcctccaggtaaatggccacattatccgccctctctgaggacaggagtctgtcgttaatcagggaattggctgcctgggccgtgtgtccgtttatgtaaatggccaggatattgtcctgcttttccttcagcatgattccaaccgcgtccagcatggatttgctggcatccgtaagatttgcgttgtcaggcgcaaacagtaaatcattcttaaaacggatgtacaccgcgttctcactgttgctgacaaccgcgtccagattctccgaatcaaaatatgtctgtatatccctggccatatcagccatttccctggccgatgcctggtactgctgctgtgtctgctgcagcggcgcctccgcgtcttccggcgcctgggcgccttcccctacaacaggatatttcaaatcggaaggcacgtcctcaatttcggtctttgcctcgattcccagctgcctctgcatggcagacgcaacctcctccagtttggtcaggtttacatttgaaatactgtataataatacgaaaaaggtcaggacaagggttatcatatccgcgtaggtatttaaccactcctggcctccttcttcatccttctgccttttcatttatttaccaatctccagtgcttttagagccatgctttttgcaacattaagggccgtgacattcgcctcataggcgcgggaggcagccatcagatccaccatctcctccgcactgttcacattgggcatcatcacatacccatcctcatccgcatccggatggtccggatcatagaccggcaccgaaggattctggctctccaccacttcctccacaaatacgccgccattctccgcctttgtcatggcctttcccagctcggtcttaaagttcagtgtattttccctgaacacaacctgcttcctcttgtagggacctccctctgccgtcctggtggtgttctggtttgccaggttctgcatgatgatatccgtgcggaaccgctctgctgtgagagcggaacccgttatattaagagaatccaaataccccatatctgtctcctttatttgcctgtgttattaattacataccgcagcgtggacagcttgcctgacacacgccctgtgagagccgaatactgggtataggccttccacagctccagttcttccttttccacctggacattattgccgtccggcctggcctgggtgtttccgtcctcttccaccactggtttggatatacgctctgttccctgggctgtctcgtaaagaacatcccgaaattccaccttcttcgccttatatcccggcgtctccacgtttgcaatgttgtggctggcaatctgctgcttcagccacatgccatccatccctctttccagagctcccaaagccctgtcatcaaataacggcatgttccgcctccttgtctctcatcagcctgtgtggcctatacgtacctgtttatccgcctgggcaaatgcctctttcaattcctctatcatggggagaatctcgttcactgtctccgggttcttcctcacattggcctgtatgatctggtaattaaaatactcatagagagaagacaatcccttggaaaccggatactggggatccagtgtggatgccagatggctgataatagcctgggccttcttaaaatgggtattggttgcttcgcagtcccctgcctccagccccgcaagacctttgttcagacggttgattgtctcatcgaacagaaggttaatcatatctccctgggtcatggtcattatggactgctgtttatattttgcatatggattctgcatagtgattactccttcatcatgatgagaactgctgggtaagccaggaactctggctgttcatattcgatatagcctgttccatggcattaaactgattccagtaccgtgtcttttccagct

SEQ ID NO: 3464 - DNA, 1771 bp, Unknown
  gut microbiota DNA sequence
agccaatccgttacattggctgtccggtcgtgaggaacgaaagcgacgtgaggggtgcgcgaagactgcctgaaggacatgatcctgtccatggacgtgcaatacatcttaaggcaagagcggtacacacctgactctcaatcaaccataagcagggttgaatcgccatggccccggacagctgacaatgatacttccgtccagtcacagcccccttggccggggaccacgcaatgagggcggcccccggagaacccggaggaggtggaattcctatgatgcctgtacgctgcaggcaggcggactgactgccctgtccaggtatccttccggacaagcttcggggagtagtgtcaaatagaagcacaaataagaaacagagagaaggtgagttcgatgccagatcatgcagccgttcttccgggatgactgcatggatgtgggatggaacgaggccagaatggatgaacgtgttacagatgggcactcccataacggctccaggaacgatacgcatgaggaaatccgtgaggtggaaatagcgtattcccggaggaactatggaaacaatggagctgcttcaatacctgcgattcagggaagtacaaaagatactggatgagctgctgcgccaaaggctgattgaccctgtcatgtatgacatggtccttcggaagtatcagaggatatgttcccaacatgttgtatgaaaatgtgaaaatttggagaactgatacttgatatggtgcaggaagtgtggtaatgtgtcttgttgaaaacggaggaaaggaggcgcagcaagtggcagaagtattatgcatcccaaagaccaaaccagagcgtacaggataccagatacggagcattcgagtgtgtgcatactgccgtgtgagcacggatgccgatggccagtatcattcctatgacgctcagatggagtattatagaggacttatccagaaaaatccggcctggaaattctgcgggatatatgcggatgagggtataagcggaaccagccgatgggggagggaggacttccggcggatgctggaggaatgtgaaaaaggaaggatagacctcatactgaccaaatcaattacccggtttgcaaggaacacagtggacaccttatccacggtccgccatctgaaggaaataggggttagtgtgtattttgagaaggaaggcctgaatacgatgacggaggagagtgaagggatactgactatatacggtgcggttgcacagcaggagtccgagaacatatcccaaaacgtccactggtcagcggtaaaccggttccggcatggtacattcgtgataagcaggcggccgtatggttacgataaggatgaagagaaggagctggctgtcaaggaggatgaggcagcatggatccgcaggatggccagcatgtacatgaatggagtgagtggggtgaggatagccgaatatctgaatcagaaccaagtagcggcgccgtatggtgggctctggtcctccgaagcggtcctgcggctcctgttcaacgagaaaacagtgggtgactgccttcaccagaagacttactcaaccgggacagtgccgttccggacggagaaaaaccgtggaaagaagccacagtattttataagggatgaccatgagggtatcctgagcagggatgaacagatgaggttacaacagataaaggagcaccgtcttggccatcgggccaggatgaaatcatgtggaaacgagggagcctatatcctaagcgggaaggtgg

SEQ ID NO: 3465 - DNA, 722 bp, Unknown
  gut microbiota DNA sequence
ggaattcaaggtcaatgaccgtttcaacatcgtcataccggccatgggggattccatgctgttcatatgtgaaatacgccgccgggtggatcgcccggaggggggctatggctatggctgcgaattcgtggaaatggccacaaagcaggaggacctgctgtatcggtatattctcagacggcagggggatcagctgcggagaatacggtaggtcagagagatgagagaagggattgttaggaggaaacgcgtattatggctcagaggagacccagggaccagcgtgtggtcaggaaccggcgggtggcaatctacaccttcctgctgatcctgaccctgttttatatatcggcccacaggacggtccagaaggagcgggagttggaggcgctgcgggcggagacggcggcggaagggccggggggacaggtgaaggaactggcggaaggatggccgggagggatgccggaggaagtagtgggaggacagacagggggacagccgaaggaaccggtacaggaacagccagaagggttgccgggagcgcgggtttacaaagaacgaggcgagatggacgcagatgcaggtcttaaaattctgccggaggatatgtggtgtctgatacttaccaacgcagagtatcctgtgccggaagactatgaggtggaactggaagccattcccggtacggagcagtcagtggataagagaatctatgagcc

SEQ ID NO: 3466 - DNA, 695 bp, Unknown
  gut microbiota DNA sequence
gtttttctttgatgattccagtcagtatctttttcgtttcctcttgatacagagttggctctgttttcatccgcataagtgcttgtaagaacattccatccaactgcttctctgtcaggacgggcatcttacatggttccttcgtggccgggtcgtaatgcctgcatttccaataccgaacgttcctgttgtcacacctgctgctctgcttatagatggaatataccccgccgcagctgctgcatatcaaccggcctgtatacatggatgttctctggatggagccggttggatgacgctggttccataaatctcgggagcgtttcagatgttcctgtacccgtttaaactgctcgtcttcaatcattctcgggtacggctctactcccagataatccttgttatgcaagatttttcggataagggctggtgtccaggacggttttccacgggtggtaggtgccttcctgtcttttaacatccctactatctttttgatggattctcctccggcatatgcatcaaagataaggtgtacagcctcgctctgctctggattcattctcatgtctccgtcaaccagacggtacccgtaggtgatatagttgttcacatggcattcctcctgtcatatgaccggttcatataggttaagtccgcaccgcagatggaagcccagttcccgttcctttccc

SEQ ID NO: 3467 - DNA, 221 bp, Unknown
  gut microbiota DNA sequence
aaagtatacaatgccagatgggttctggagagagcggtgagagaccatggacttcagattgacacagagaaggtgaaggaagcggccggatttctgaaacaatccctcaggcacatagaggaaagccgggacatggcccagctgcgggggtatgaaggtgaggatgcaggcatttattttggagttttcgaccagctcatattacagcagaaaaaggattt

SEQ ID NO: 3468 - DNA, 476 bp, Unknown
  gut microbiota DNA sequence
aagataaattaggttgaataattgagggagccttgatacaatataccataggattatcagccccggcagaaaaagggctgatatgggtgaatgcagatgggaagaggagttgagcatatgaagaaaaagatggtggcggtgtgggccctggcggcagtgctgtgctttggtacggctacgatatctgccctggcagcagagggttgggttcaatcagggagcacctgggtctactatgactccaacgggaataaaatatataatacatggaaaaaaggggcggacaaccagtggcgttatctcaacggcgagggagttatggccaccaatgcgtgggttgagtctgattattatatggacagcaacggcatcatgctcactgacaagtggctgaagcttaccggcgaccagggcgaatacgagtggtattatttcagcagcagcggcaaggtaatcacagatgcctggaaaaagat

SEQ ID NO: 3469 - DNA, 865 bp, Unknown
  gut microbiota DNA sequence
ttcctgtgcactgcgtgtatttggcttaaatgcagcagcaaccggtcttaatgagcggaatgcccgcaaagccggaattccctgcgattctgtttatgtgattccaggtgacaaggtgggaattatgccgggaagtgcacctatgcactttaaactggtgtttgaggtcccaaccggaaggatcctgggtgctcaggccatcggaagaggaaatgtggacaaacgggtggatgtgattgcagccatggtttccatgaatggcaccatccgggatttaaagaacctggagctgtgttattcaccagtatttggcacagccagagatgtggtaaatcaggcggctctggtggctgaaaatattctgtacggacgtttccgccaggttccggttacacaggtaagaagccttgtggaggaacaggcgttcattgtggatgtacgggaaaaaggagagtatgaggccggacatttgaagggttctgtgaacattcctttaagtgagcttcgcgagagaacggatgaaattccgaaagaccgtccggtatacctgcattgccgttccagccagagaagctacaatgcgctgatggcgcttcagggacggggatatgagaatgtggttaatatttccggatcattccttggaatctgcctgtatgagtactacaatgatgtggccatggggcgggaaaaaatcgtgacggaatataatttcgcataaatattctgatatttttatacaactttcagattgacgcagagtgtgtgttggagtaagtttttatgaaaaacgcacattctgcgtttttcgctgttgtcatgtgtctgaaagaagctaccggcgacagaacctgcgaatcggcag

SEQ ID NO: 3470 - DNA, 7885 bp, Unknown
  gut microbiota DNA sequence
aaagatacagaccacgttgggcacctacggacatttatatcccaacaccaacgtggaagttgcaaaaaaattaactggcgttctcacttatactccggcaacaaccagtgttgccgcttacaccagcaaccagcatacatcaatctatcacagagcagttgaataaaaaatgcaataaaaatgcaattctaaaaggaaagagccgcaaaaccattgaaaataaaggctttgcagctctgctccaactattcccactcaatcgtagccgtaggcttcggactcaaatcatagcacaccctgttcacattcttaacttccttcaatatacggtccgtaatcttctgcagcacgtcataatcaattcgctcaatggaggcagtcattgcgtccactgtattgactgcgcggatgatgacaggataatcaaagcagcgcgcattgtccctgactccaactgatttaaagtccggcacaatggtaaaatactgccacactgtcttgtccaggccggcatttgcaaattcctcccggagaatggcatctgattccctgaccgcttccagacgttctctggttatggctcccaggcagcgcacgcctaatccgggaccagggaagggctgacggtataccatgctgtgaggcagacccagctccagtccgcaggcgcgtacctcatccttgaacagctggcgcagcggctctaccagagtgaagttcaaatcctcaggaagccctcccacattgtggtgggattttactaccttggctgtcttggttccgctctccacgatgtcagggtaaatggttccctgggccaggaactcgattccctccagctttctggcctcctcctcaaacacgcggatgaattcagcgccgataatcttacgcttctgttccggatcagccactccggccagctttccgaggaaacgatctacagcatccacatataccaggtttgcatccatctggtttttgaatacatcaataacgctctcggattccccttttctcataagaccatggtttacatggacgcaggtcagctgttttccaatggctttgatgagcagggccgctaccacggagctgtccacgccgccggataaagccagcagcactttcctgtctcctacctgctggcggattaattccacctggtcggaaataaagttcttcatattccagttggcctgggccttacatgtatcaaatacaaaggaacggagaatctgggcgctgtcagcctcatcccagctatgtatggaacgctcacaggccgccgcgccgtggcctgccgccattaccgggtatcctgcctcatacagttccggacgcacatcaatgggggttccgtccacaacattgttagggccgccgttgatgatgattcccttaacgttgggaagttccttcagttcgctggctgtgatatcgtggggatatatctcactgtacacccccatctccctgatgtccctggccagttttgtgttttctgtgcttcccaggtcaagaattacaatcatatcctgtttcatcttctgcctcctgaaattatttgaattttgcttcttttgttaaaatatccttcttggttcttcctgattcttcatttgaccgaaacgcctgtactgctgcctgttccacagcctgtactgccgtccgttccgcctgccctgtaccgcttgtcccgtgctttactccgacagttctcccagataagccagcaccgccctcaggcagccgtccacccctgtcagcccgctgtccaggcataagtggtagttctgggcccggccccatgtgttgccggtgtagtactggtaatactccttgcgtttccggtccacctcccggatacggcgctccatctccttctcatcagaacccggttccaaaataagcatacgcttaatccggtccctcatcttggagtagatgaacaggttaatgctgtcatccagaatcatgtctgcacaccgtcccacaatgacacatggaccgtgagcagccagcctgcggatgacattggactgggccacgaaaatctggtccgacatgggtactttgtaaatgtcagaaaaggcatggtaatactgcctgtctaacgggtcgtgaatcacgatatgctcatcgtagttttggaatgcctcttctgcaatattgatatcgtccgcagccatggagattaactccttgtcgtaaaatgggatgtccagcttttctgccagctttaccccaagctcacggcctccgcttccgaattcgcggcttactgttatgaccttatccattaagcaccgcccctttcctttggttggttttgttttgggtaggatgagctttgaatgggctcagtcagcagtgcacatcgcggccaaggccgctggttcaagggcttagccctataaaaaaagcggcaggcatatatccttatgtgagcaagctcccaacggatatatgcccaccactttttttgcactgctcattgcctacgtggacattataccacaattccccattatttcctatgcttaatatctcttataatcttaaacatctgtatcagtaccgtgggtactgcggccaggagacagacattgatcagctggctttgggtcagcggtgttacggaaaacaggttctgcatgaacggaacgaacatgacaatacctaacagcaccacacctgccgcaaatgctcccaggctgtaccagttggatgagaagcccagcttgaaaatgttgtgcttgctgcggcagttgaatccgtggaacagacgggccagggtcagggttgcaaacgccatggtgctggctgtggccgcgctgccggttctgagacctgtgtggaaggcgatcatggtacagacagctatgattccgccctgggtcagaatagtggtcatgaagtcctttgtcaggatgcctgtcttcggatttctgggcgcctccgacagtaaatccttctcagccggctccatgccgatggctatggccggcagtgaatcggtcagaaggttgataaacagcaggtgtaccggggcaaacggcacaggcagggctgccagggatgtgtataatacagaaaggatacctgccatgttgcctgacagcaggaacttgatggcattctttatgttgcggtatacgtttcgtccgttggccaccgccttgatgatggttgcgaaattatcgtctgtcagtatcatggctgccgcatccttggaaacctcggtgccggtgatgcccatagccactccgatgtccgccttcttaagggcaggagcgtcattgactccgtctccggtcatggccgtgatggatccgcgcctctgccatgcgtccacaatgcggattttgttttcaggtgaaaccctggcgtagacagatatgtccgtgatcttgcggtccagctcttcctctgacatggcgtccagttcacggcccgtcatggctatatcgccgtcctcaaaaataccaatctgctttgcaatggcagtggcggtaatcttatggtcgccggttatcatgacaggcttaattccggcccgcttggcgtctgcaactgctgcctttgattcttcccttgggggatccatcatggatatcaggcccaggaaaatgaagtcgttctcattgtccagggacagggtatagtcttcaggtacttccttatatccaaaggccaggactcttaatccctcctgggaaaactccaggttcttctgaagaatggcctccctatcctcctgggttatgtccctgattccttcttccatacggattttcacggtgcggtctaaaagtacatccaaggctcccttggtaagtacggtgggcacatcgtgaagttcgtatttggtactcatgagcttccggtctgagtcaaagggtatctcctccagacggggcatcagctctctgagcaggttttcgtccacggtcgcctttcttcccatctccaccagcgcaaactctgtgggatctccgatgccttttccgtcaacgatagatgaatcgttggtaagtatggcatcgtagagaagataacggtgaagctggttcttcagattcaactggtctatggtaatggtctgcccattggtgtaaatgttctggaccgtcatcttattctgagtcagggttccggtcttgtccgagcagatgacagagacgcagcccagactctccacagcctttaactctttgataatggcatgttcttttgccattttctgggtgcccatggcctgtacaatggttacaatggagctcagtgcctcaggtatggccgccactgccagggccactgcaaacatcagggaatccaggacaggcatttttcggtacaggctcagcaggaataccagggcgcatatgaccatgattgccatggcaagacggctgccgaactggtccaggctgacctgcagcggagtctttttctccttggtagcgttcatcagggctgctatcttgccaatctctgtatccatacccgtggcagtcaccaggaccactgcccgtccgtaagtcaccaggccgctggaatataccatattggcccggtcggccagggcgcagtcgctgtgcagggttccgtcgctcttatccacattggtggactccccggtcagggagctttcgttgacctgaagggaataattctccagaatccttccgtcagccaccaccagatcgcctgcttccaggtacaggatgtctccgggaaccaccttggcagacggaatctccaccttctgtccgtcccttaacacctttgcgttgggggatgacagggatttaaggctgtccagggatttctcagcctttgcatgctgtaccgtgcccaggatggcgttgaggataataacagccaggatgactaccgtgctctccacattgcctgacaccatggaaataagtgctgcaataatcaggataaccaccagcaggtcgcagaactgctccaaaaatacctgcagggtactcttgcgctttccctcttccaggacattctctcccttctcagccaggattttctctgcctgggaagaggtcagaccttgttccgttacctgaaactggctgagtatctcttcttttgtctgttgataccattctttcatgtactttcctcctcattatgagttcttagtctattatgcgcgtatccctgcgccaaaatgccccgggcctggcaaaaaaagcttatccgccacgctccggcgccgggaaacccacaaaaaaagacttctatggatggctgccaggatatgtaacatatctgcaaaccacgcataaaagtcttgtaaccataaaggcatatattgccaggttccgttggaaccgaggttgttgacaatatatctaaactactccctttcgagctgttccgcattcattatgaatttttattgagtttatcctctttttgcggaaatgtcaaggggttttaaaaatttaatgattgggcctgattgggtttctgattagtggaacacctccacctcaaagcccacgatttcgcccagctcctgtaattcctttacatgattgccgtaaataatggcctggtgatgtccgtaacctccctttgccaatgcctgccggaactctctggcgccgccctcgacctcgtaatacaccgcaggactgcagtatacgggacggaactcgcatcccagggtatggcctacggctaccatcatcctggtaccctggcggttaaagcggccaaaggtaaccacctgtccttcctcctctgccatatccacatgataatgggcgccccagccctgggtggtaaaatgggccagctcatatctctgctccggctggtcaaatccgcgcatcctgcgcaccggcacagcgtggtggatttccagtacatcgtggtcaaatacctgaccgggctgtgtcagaagctttggcattcccagctgttccaaggtcctgcttccggcaagcaccagtaccggattgcccatgaacacgctctggcgggtcaggtacatcatcatcatcatggccatccatacagccagatcctcctcacatgctgacggaatcctgtcatctttattcagggagtgggtgatgcagggaacacacttattcttctggggaaggcggctggcacacagttccttgcacggggtggtgaacgcattgcagtcatagcgctccatcatcctgcgcaccgcgtggaaataccgcagatcgctgcacagatactcctctgtgatatccactttgtccgccccttccatcagggccctggcctcctgatggattccctcgtctgccggtatctcatcaaaatagttgaacacctgtctgaagtcaatacggttatggcggatgccgtaccgtgtgaacaggcttaccagatcacagcagctggtgttgaccgatgccggagtctgctcggaattggacaggattaaaatttttgtatttgcgacagccttacgcacctggagacaggtcagaatacggttgtattcttcatagtcatgggccatatatgcctccagtccgatgtccctgtaatatcccacaaggtcgatgggggtaggtcccagattaatcatggaaactggcttgttcaaacgctcgattcccggtacgcggtatgtaatcaaatacaaatccacctgatgattttcaggcatcagcttgtcaaattcagaatcccgcatcacaaaactctcgtcaaattccatgtaaaccggatccatcagattacagcgggtcagatccaggttgttctgtaattcctcgtaccagattttaaattgttccttccccaccctgcgctcaaattcaggcgtgccctcttccataggccctacgcggcacgggccttcccaccagtctgtgtgtacaagattgctgaaaattggttttaagttaaccttgacatccattgcatacttcataattgacctctccttttatatcgtttttatttgatatcgttttcactcaacatagtcttcatttaatatggttttcattgttggtatagatttttatatttcacatatgcgccagcatctgataacattttgacaatccattttccttaatctcagggtaaatcacatcgtcagatatataatccagaaatctcatgggatgggactttatgatttccggcgttcttgcctggtacagttcttccagaatggaaagcacgccccgtaccagcagcgaatcactgtcactgtaaaaatgtaccattccatcccggtcctctgcccggagccatattgcagtcctgcatcctccaatcctgtaccggtccacacgcagggaatcaaacaaaggcttttccattccaagcataagaaggtattcacactgggctccagggtcctgcaaccggagcagactgtcaatatactttttctctgcccggcatatatctgtccggcatatgtccgattggcatatgtctgtctggtctttttcatccattagcttcccctcccgcagatccgttccagcctctctgccatatattcaatctcctgctttgtattgtaaaaagacagtgatacgcggcagagactttcctttcccatacgtttcattagggggtaggcgcagtgggaaccgcatcggaccgctattccgctattggccagcagaacacctatgtcataagcacccagcttatctgtctcgaacactgctatgggcggtacggacccgccagactgtagctgtggtacggacccgccagactgcggctgcggtacggacccgccagactgcggctgcggtacggacctgccagataagggctgccgcacagccggttccccaattacatgtacccctttaactgcttccaggcgttccct

SEQ ID NO: 3471 - DNA, 3148 bp, Unknown
  gut microbiota DNA sequence
tcggacccgccagataagggctgccgcacagccggttccccaattacatgtacccctttaactgcttccaggcgttccctcagatacgcgcccagttccgcctcatattggatcatctcctcaaatccccttctgttgagatagagcagagctgcctccagtccaagcgctccggctatatcctgggtaccggcttcgtatttggatggggatttcttatatgaaacttctccccggtctcctttcaccaccatatccccgccgtacagatagggagccatctcctccagatacatccttcttccgtacagtaccccgattcccatagggccgtatatcttgtggccggagaagcaaaggaaatcacatttcatctgcctgacggatatagcccggtggacaacggcctgagcagcgtctatcaggaccagtacgccccgtttgtgggcttctcttataatacggtccacgtccgggcagaagccagtcacgttggacatggctgtgacggcaatcagtctggtgcggctgtccatctgatccagcacatcctccgccctcaggctgccgtctgtctgtgccaatgccacacggaattgcgcgcattttttctcacattgattcttccagggaaaatagttggaggaatgttccaactcagtgacaattacattatctcccgggcagacatatgtctcaaatacagccgcggcagccagattgactgactccgtacatcctttggtaaatacgatttcctccccatactccgcatccacccatgaccggaccgtctccctggccctttcatacatacgggatgcctggctgctgagggggtagcttcctctgtgtatattggaattctccatggaatagtacctgtacagccggtcaataacagcctggggcttctgggttgtggccccgttgtccaggtagactaacggctttccttcctggttcagaattggaaaatccctgcggatttcagttacatccatatcattttccccctttcaggtgccttatgacagcgtcagccagttcatccagattctcaatgtctgaggcctcatcatcctccatggcaattcccagctccctctctataaacataagcagcagtacctttttctgcaccgccaggctggtctggtggcagtcgtatttctttatctccctctgaatcacctcatccggcagatttcccttccgcaaatcctggcgtttgatgcttataatgacaagctttctgatatctgtctgggtgtcctcctgaatcataagcttcaggttaactgcttttctcagcaagggcagaattacttctttttctaatccttcacagggcatggattttatgcggtccagcacagctgaggcttcccttgtgctttttacaatttcatcaatcatagcagctgtttccttatttttttcttagattcgcttacatattttcctgtttttcttacatttcatattatatctgatgtgctgcggcctttttttgcagattatcccggcactttgcattttcttcaaaccgtgctatactaaaacgtgtttcaacgtatgacagataaccgttcaggaggttcccatggacatcccgttttcacgctacacggaaaagctgccggaggaattttccgtaaggcacaagataactgagacaactgaaaaaaggaatttccacctgcacaggcagatggaaattatatttgctctgtccggcaacttaaaatgcaagtttgaaacaggggagattgatattcccagaaatgggttgattctgtttaaccagatggatctgcactatatctatccggaggacggttcaggaatctgcgaccggtatgtgctgtatttttcctccaattacatatcccggttctccactcctgaagtgaatctgctggaatgtttcctgtttcgtcccggcaatcatcccgtggtactcactgttccggaccggcagctggactcctttctctccgtgctctccaggatggaggattacaacaggccggaaagcggcggctctgcttcacctgtttacggtagagatctgcaccttaaatttctgctgggcgaatttcttctgctgaccaaccagctctacaccgagaggtttggccctctaaacacggctgcctaccaggagcatgcccggctggtatatgatatttatgaatacatcgggggccattacagcgacaatctgagcacggacagcctgtcccggctgtttttaatcagcaagacccagctgtattatgtctttaaggagatctccgggatgacagtgagcgactatattacagaataccgcatcaccagggcaaaggactttctcattaatacggattactccgtggaaatgattggacaggccgtgggatataccaacctcagttcattttccagggtcttcaaagagcaggccggatgcagcccaatccagtaccggaggaagcatgcggattaggcttggtgctgcagcgcatatccctattcgccaatcccagtatcaatctggctgattccgtggcagaatgcatactttttcttaaatccggctgccttcccctcagaaccggtcaggctgataaaatgctttactgttttcttacattcctgttccacttccatcataagggacatataatccaggtccggtttttcatccagacggttttttgcgtaatcccggcatgcattgaatatctcggtggcaatgttcaccttgttgattcctgcttccactgctttcctgatgttctcgtctccggatccggatccgccgtgaagcgccagaggcatgttcactgcctgcttcacaccttttataacatcaaaattaatggtggggataaagcctttgggataatccccatgggcagtgccgcaggcaatggccaggctgtccaccccggtctcctgcacaaatcgcacggcttcctccggctttgtgtacagcgacacgtcgcatccgtccagagtggcggcctggcctacatgacccagctcgccctccactgccagtccctgtacatgacacagctccaccgcctttttagtcctggcaatgttctcctccatgtcataggccgaggcatccaccatgatggaggaaaatccc

SEQ ID NO: 3472 - DNA, 8861 bp, Unknown
  gut microbiota DNA sequence
tggctttgtgtacagcgacacgtcgcatccgtccagagtggctgcctggcctacatgacccagctcgccctccactgccagtccctgtacatgacacagctccactgcctttttagtcctggcaatgttctcctccatgtcataggccgaggcatccaccatgatggaggaaaatccctgcctgtaagcccatgtaattttctcccagtccctgccatggtccagaatcagggccaccggcacattggtctgttctgccagggtcttaatcatgggaaccatcagctccggcctggcgtgctttgtcatctgggcctggcccatgaggataatgagcggcgcctgcatttcatctgctgccgctataagtcccctggccagctccatgttaaatgcggatgccgccagaacagcatagttgttttgatttgcatcatcaagaattgttttgatatctgtatacattatgtactccccttaaattttagtatttcctgtagcaatgcgatttcccggtactgcccagcacctgcatctttgtccctgccacatttctaacctcctgcactgcatccttaagaaccagtgtgggactgaccagggttggatgatttgttacaaattcccttacgctttggtaataggcatgtttgaactcactggatatatttaccttgtgtatgcctgtcctgcaggcagccgcaacctcatcatggggcgtgccggaacctccgtgaagaactaacggcaccggcaccgcagctgccagctctttcagaagcccaagctgcagcttaggcacatatccttttggaagaatgccgtgtaccgtgccaatggagactgccagggcgtccacgccggtgtcctctacaaaccgtctggccagctccggtgatgtatataccatatcccggaccgtgccgtttaaatagtcctcggtctcccctatggtgccaatctccccttccaccgatacgccggccccatgggccgcctccacgacccggcgtgtacactccacattctggtcatactccatctgcgagccgtcaaacatgacagaggtaaagcctgcctggatcgcgcggatgcatccctcataggatttgctgtggtcatagtgcagtacaaagggattcctgctgcgctgcaggcggaccgagaaatacaggtacagttcccgttccgaaaactggaattcattgggagagacctggataatggccggggcttcccggtactgcgcctcctccacaatggctttgaacatggtactttctgttacattaaatcctcccactgcaaaattatcctttacggcaggttccagtatttcccgcagattcagcagcattttttatcctcctgtaaaaacatacccgaatgtgttaaaagttctcaaatgtcattccttctgtggtgctctccccattttcctgttccattccaaagtccatggaatcgtcttccgtcaccactttcttccacagggagagtatcactcccatgatgacgcctcccaggaccaccatggctgccatcatcattggcttattggacagcgggatgataaaccatcctcctgctgttacatagttctcaattcccagaaccatggtcaggcctcctgctatggaggtggcaatcacggaggaaccgattacgcgcagcgggtcgttcatagccaaaggaatcacaccctctgtaatcatgcagatgcccattgggaacgcggcctttaccgcctccttctcggcctttgtgtacttgtttctggtaaggatgtaggaaagggtcacgcccacaggaggaatcatacatgtaaccagcttaactgcctccggtccgtagataccgtccaccagaagaccattggcaaacagggatgcggtcttgccgataggcccgccaaagtcaacaccgcacatacctcccactatggctcccaggatgaatttggatcccccctgaagtcctatcagccagttctgcaatgcattgatgacaaaggcaaccggtttccctatgacagcaaacataagggctccgcaaatcagcgttgtcaggaagggcagaataagtacaggaaccagcccctgcatggtcttaggcaccttcagatattttttcaggaacagtaccgtatagcccacaagaaatgccgcaataatgcctccgataaatcctgtataaatttccgatgcaatggaccccagaatcagtccgggggcaatggccggcctgtccgcgatggaatacgcgatggcagcagtgatcacaggcaccacaaagcccatgccaatcttaccggttctccagatgtaccatatcagggtaccctctgcctctgataccttggtcccgccaatggcagttcccagagccatacataagccggcgcccacaactatgggaatcataaacgatattcctgtcatcacatgcttcttaatctctgatagttttaacccacccataatcttaattccctccgtttttcttttttgtcagagcttcctcaatactctgaagcattgctcccgtatttttcatggccttctccgtgctcatgcgcaccactggtttacccttaaaccggttttcccctgatattttcacatcaatggccaggatgaccacatctgcctcctggatttcctccggtgtcagctgctcctcgattccgatgctcccctgggtctcgattctgcatgtatatcccagcttccgtgctgcctgctccagcttttccttgacaatgtatgtatgcgcaatacccgcagtacatgccgtaacccctactatcttcatcctttatttcctcctcgttcttagtggtgtggtctccctagcaaaatgcttccagaatatcttcctttgtgctgcttcccatcagtttgccgcacgttccttcctgtgccagctttttagccacgctggccataaggcgcaggaaataatcatccttgtccttttgattgatggcaaatataatgaaaacctgggcaggcaggccatccagcgtctcccactgtatgggctgttccagcttaaggaccgatatacagttacgcttcactgccagcgactttccatggggaatggcgattccgtcccctatgcctgtttttccctgggattcccgtatatataaatcctgcttgaactcttccttggatgtaatgctgccgtcctttaaaagaaggtcgcacacacattcaaacacctcctccttattctgcgcctttacattgacggccactgcattttcattgattacctccagcagattcatgctttcctgtctccttttactatagaatttaaatagcctgctatttcttcctgccctctcaggctgtggaattcttcataggcttccttgtcgtccaataaagtcacaatggcggaataaaagcggataatctgcccttttgccttaaaccgttcatccagattcaatgccagaagaaaaatccggtccactctcctgtccctgccccaatctaccggttcctccaatatggcggccgcaatgaccgggcggcagacacaaaacgcagctccatggggaatggccaccccaagttccagcacagtggatgtggtttcctccctgtccagtacagtctgctcataatcctttgtaacataacccgcctctgccagcctggcgcacaggaaggatatgatttccttcttatgtgtcctttccggaaaatggtatacaagggacggatgaaacagctggtactcggagagctctgtcttttcggcaatccgtctcatcttctttttccgcacctgtttcatcttattctgaatctgctgtatatcccagggctgcagcacatttccaatctgtaccacatccctgcctgcaaacacatcccccaccggaacagatgatataagaaaatcacactggctcctctgaatcttacatgtatcccttgtggtcaggacatccactacattaatattctgtatggagcgctcaatctgctctttgagaattctggatattccgataccatgattgcacaggatgcacacctccactcccacgttcagccgctcaatggcaccgcctatatataatgccaggtacgccacctcatcttccccgattctcacttcaagttcagactcaatgataagacttgccgaccaggcagcggcataaatattgggatacttggacttcactacctccttcagaggattttcctccaggatgccgcaccgcagtttcaaggtcttggatttcatatacagaaggaggctgtcaaaaaggtaatcatccctgtcaagcccctgtcccagaatattgccggtaatggaaatcaccttgtctgtcacccggcagatgttttggttggcctccatataagtctgcctggacgcctcgtctgtaaactcctgtatctcggcagcccctaaaactaataccgtaaactgcttttctccttccgggaagtcggtatgataatactccttaagactttccatacatgtttcggccatactgaggtcatattccaggccctgccattctgccctctgatgcccaaaatccgcaggaatctctgcatactcctttttcctgattcgtataacacacagtgacaggagaaatgacagctgctggtacccgtcgaagctgtagtgtatcccaaattttttctccagccctgcaatggcccctgttaccccggccatatcaaatccccacaggaacttttctgtctggcttttcagggtctggtccccaaactcctgccgctttctggatatatctgcaaagagttcccacatggccatgcgccagtaatactcgctgcactcaatctgcaatccctggcctctcttacaggtaacggctacatgatgagccgtcagccatacagatgcctggctggtagctttttcagcatccagcctgctaatgagaagccttttctccagtttcatcttctgtatgcttctctgcttcagcaggagttccagtatctggaaatgcttgtctgtgccatacagctccatctggttcacatcattccatgcctgctttgccgtgtcccagtccttgtcctttataaggcacacgcctttgttgctcttagagacaacctttcccagcccatattcttccaggaagcttcccaactgcttcaggtcatttctgatagtcttaagggaacaattcacatctgccgccagacgctccacagtcacaaatccatctgacctgtacagcagcttcagaattttatattgccgttcctgcatcatgttccctcctgtttcctgttccatagcactgccatcccttcgataatcttatattaacagctttcccctatttgctatttccaaaatattgacagaacgcttttgttttgttcaatagtttttccaaaatccatgatgcgccttttattaaggtcaaacatacgccccctctcttatgccaaaaacgcagatatgcggctgtcccccgccggacaaaccgcatatcgcattcaatcttcaatttcccctgattggctgtttccctatttcaccaacgcaaactcataagcctccctgatccaccccatcagcttatcatctatctcatccgcactctgtacaatcacatgatgggtccagcggttggggtaaggctctgttgccgcctcaatccggctgtcttctatgcgatggcttactccgaacgttacaaccatataaacgccctttctgcccctgaaccgtctggaagggtgccagataaaagcaaactggtaacggtttgaaaaggcaatctgtgatttctggaccttaacctgaacggggcccagttccttaagcagacgctttgtgaacgcctcataaatgggcagggcctggggcattttttcaaaaaacaacagtactgttgaatccatatgactcctcccttctgaaagtgatgtatcctattccgattatatcacaagattaatcctgaattatttattcttacctgatgtctgtgagtattttccatgaacatgtataaaatatagttttttccatcaaaaaggggccctgcggcatactctgccgcggcccctttagtgcctgtcaattagtaccggtccgtactgtctatactccaaccgccgccttcatctgctttacataatcgcagacaggctccacacagtttattccgtatctggcaaccattttcacaatggcacttcccacgataaccccgtctgcctgtgaggccatcctgctggcctgttccggagtggagatgccgaatcctatggcacatggcacatccctgccctgctttacggtgtccaccatttccttaatatttgtggtaatctcgcttcggacgccagtgactccaagagatgatacacagtacacaaatccgtcggattccctggctatggcctgggcccgttccctggatgtgggagccaccagatatatcagggtcatatcgtattttttgcatgccggcagcagttcctcccgctcttcaaagggcatatccggtacaatcagggcatctattccacaatcagctgcatttttcataaacttatccacaccatatgcaaacaccgggttgatataggtcataaatgccagcggcacatctgttttttgacgtatccggcgcaccgtatcaaatattttatctgtggtggttccggaggccagggcccgaaggtcagcttcctggatgacaaatccttccgccaccggatcggaaaatggtatgcccagctcaatcaaatccgctcctgcctctgccatggccggcacaagggcctctgtcacggaaaggtccgggtcgcctgctgttatgaaaggtatgaatgccttcttattctcaaacacctgctgtatcctattcatagagttctacccccttatatctggcaattgccgccacatccttgtctcccctgccggaaagattgataacaataatctggtctttatccatggaaccagctatcttcctggcataggccaccgcgtgcgcgctctccactgctggtatgattccttccatacgtgacagatattcaaaggaatccactgcctcatcatctgtcacaggaacatactgtgccctgccgctgtcatgcagctgcgcgtgctccggcccgatacccggataatccaaaccagctgagatggaatacaccggtgcaatctgtccatattcatcctggcagaaataagatttcatgccgtggaaaatgcccagacggcctgttgctatggtagctgcagtctgctctgtctccacaccccggcccgctgcctcgcagcctaccagcttcacgtccttttcatctataaattcataaaaggctcccattgcattgcttccgcctcccacacatgcaatcaccatatcgggaagctttccttccttctccataagctgctctttgatttccctgctgataacactctggaaatcccttaccatcatggggaagggatggggacccatgacagaacctatgacataatgtgtatcagagatacggttagtccactccctgagcgtttcattgacagcatcctttaatgtctgggttccgctggtcaccggatgcaccttggcccctaacagctccatacggtatacattaagtgcctggcggtccgtatcctccttgcccatgtaaacctcgcattccagacccaacagggcagctgcggtggcagtggccacaccgtgctgtccggcccctgtctcggctataaccctggtctttcccatcttcttggccagaaggacctgccccagtgcgttgttgattttgtgggaaccggtgtggtttaagtcctcccgtttcaggtaaatcctggccccgcccaggtcctttgtcatcttctctgcatagtagagacgtgacggacggcctgtgtattcctccatcagatactttaactcagccttaaactgtggatcctttttataatactcatatgcttcttccaattccgtgacagcgctcatcagtgtttccggtatgaactggccgccatggattccaaatcttcctcttgacatttctgtttctccttttttaaacgattttttaccgcaggacctgggctatttcctccatcttccttctgtccttcctgccccctgtttccaccgcgctgctgacatcaatgcagtagggtccatgggatgccgcctgtcttatgttgcccagatggatgccgcctgccaggaaataaggcttttttaactccggtatcatgttccagtcaaactgggtgccgctgcctccgtacctgccctttgtataggtgtccagaagcaggtaatcgcaggacagctcctgggcctttaaaatctgttccctgcttctgacccgcaccgccttgatgaccggaagcggggtgtgtttcttcagttgtcttatgtacgcctcatcctcatctccgtggagctgtatcaggtcaatcaccctttccttttcccggtgccctgccagctccagtatctcctccatgggcgcattgacaaatacgcccacggctctgattctcttatccagctcccgccttaactggacggccttatcaggcgtaaccctgcggctgctctcggcaaatacaaagccaatatagtccggcagaatgtcattggccgccagtatatctccaaaccggctgagaccgcatatcttaagcctgcatgtcttcatcattcatctccctgctctgtttcctctatctgttctgattccctatctgtcctgtttcctctatctgtcccggttcctgtccggccctaccgtatccgggacttaagttccctgagagcctgc

SEQ ID NO: 3473 - DNA, 5208 bp, Unknown
  gut microbiota DNA sequence
gcggccttatcaggcgtaaccctgcggctgctctcggcaaatacaaagccgatatagtccggcagaatgtcattggccgccagtatatctccaaaccggctgagaccgcatatcttaagcctgcatgtcttcatcattcatctccctgccctgtttcctctatctgttctgattccctatctgctctgtttcctctatctgtcccggttcctgtccggccctaccgtatccgggacttaagttccctgagagcctgctttttatctgccgcccgcatcagtgtctctcccacaagaaccgcatctacctggttctccgccaaaagctctatatcctcaggcgtcctgattccgctctctgccacaaatatggtgccccggtccaccagcctcctgagcctcagggcgtttgtgaagtctacctcaaacgtgcccagattgcggttattgattccaatgatatcggcccctgcctctgctgccatagccacttcccggtccgtatgggcttccaccagggagctaaggcccagtctgccgcagatgcccatataccgtttgagctgttccatgtccaaaagggaacagatcagcaggacagcggaggcgcccagcacctttgcctcataaatctggtattcgtccacggtaaaatccttgcgcagcagcggaaggcctatctcaccatgaatttcctccaggtatcggtcagctcctaaaaagaattcaggctcggtcaatacggatacggcatctgcgccggcttcctggtattgtctggctatttccacataaggaaaatcaggagcaatcagtccctttgagggcgaagcctttttaacctcacagataaaggagactcccggtttagacagcgccgccttaaaagaatatcctccgcctgttccgtcttcccctttaatatcttccctctttatgccttctctctctctgcatttgaaggcttccttcatcacctgttccagcggttttacctgcttcctttgctccacccgtttcccggcggaccgggcaatggtatccagtatcatgacgccttcacctctcctgctgcttttttggttgcctggataaattcttccatcttagccatggctgctccggaatcaatcatgtcctgtgccgtcttgacacagtccctcaccgtgcagtcatcaattcccagatataagctgatggccgcgttcaaaaccactacatcccgcttcggtcctttcaggcttccggacaggatattccttgttatctgtgcattctcctcaggtgtgcctccgatgagttcttccagattgcatacggtcaggcccaattcctcaggcgtcatatcataagccgtaattttcccgtaacggatttcacatacatgggtggggccggtaagtgtcgcttcatccagtccgtctcccccgcataccaccattcccctggtaactcccaggttagccagcacctgggccagcggttccaccaaatcccggctgtacacccctaacagctgcatggatgcgcctgccggattggacagggggcctaatatgttaaatatacttctgattccgatttctttcctcacaggagccgcatatttcatagaagaatggtatgccggcgcgaacaggaagcacattccggtatcctctaaaacagtttcagcctgttccgccgtcagagccagctctgcccccagtctttccagcacatctgccgcgccgctcttactggatacgctgcggtttccatgttttgccacccgtatgcctccggcggcagccacaaatgcgctggtggtggaaatgttaaaggttcccacctcgtctcctcctgttcccacaatgtccatcaccggaaagggcggcgacagctttaccgccttatcacgcataacagtggcgcaggccgtaatctcatcaatggtctctcccttcatcctcagggctgtgagaaatgaggatatctgcgcctgggtggcatttccgctcatgatttcatccataacctccttggttgtttcaaaatccagattcttattttctaccaattcatgaattgctttctgtatcatagtcattctcctttttacaatgtctgatttttatttctgtttcgtttgtctctcaccatttacattgcctgtatcgtcccgatattaaggaagttttccagtattttccttccatccggcgttaatatggattcgggatggaactgcagcccgtatatgggatagtccctgtgcgaaactgccatgacctctccttccatacagtccagggccaccacttccagttcctcgggcaggctctcaggcactgcggacagggaatgatatctggcagccggtataacggacggcagaccttcaaataaccggcatccgcatcccatcttttccggaagtccggacttttcttcctttatatgactgtccagcctgatatcgctctgctttccgtgcatcagcttctttgcatgggcaatggttccgccgaatgcctcgcatataccctgatgtcccaggcacacgcccagaatgggcatttttcccttaagctttatcactgcttcctccagtatgccggcatcccggggatatcccggtccgggcgacagtatcaggtggcttggtttcatgctttctatgtcatccacggttacctggtcgttgcggactacctttatatccggctcaatactcccaatcatctgtaccaggttataggaaaagctgtcataattatcaattaatacgatcatctgtcgtctacctcccctgcctgaagaatggcctgaatgacggccttggctttatttgctgattcctcgtattccagttccggaacactgtccgccacgattccgcctccggcctggaccgtaacctttcctgcctgctttaccgccatgcgtatggcgatgcatgtgtccaggtttccggtaaaatccaggtatcccagggctcccccgtagattccgcggggaaccgactccagtttttcaataatctcacacgcccttatcttaggcgctcccgatagggtgcctgccggaagcagggcctccaccgccgagcagccgtccaggccgggttttatatttccttccacctgggaacagatatgcatgattttggaatacttgtgtatcatcttgtactccgtcacctccacggacccgaactcagcgatgcgtccaatatcattccttcccaaatccaccagcatattgtgctcggaaagttccttttcatctgccagaagttcttcctccagccttctgtcctcctcgtccccggctcccctgggccgggaaccggctaccggaaaggtagtaagacgcccgttttcaaggcggaccagtgtttccggggatgtactgatgatttcatcctggtctatgttcatataaaccatgtaaggagatgggttggtcgtccttaaaacccggtaggcgttcagcagactgccttcataggaactggtaaactgtctggatataactgcctgaaagatatccccgtccagaatatactcctttgtcttttccaccgtaccgcagaactcttctttggaaacactgcatacaaaggatggtttctccggcgaggacagcctcttaagaggtgccgtgtcactgataagggatgccatttcctgtatttcctcacaagcccttttgtactccttcatcaaatattccagaccgccggaggtgttcccattttcccggccttcacaacgcttccggccttcgcaccgctccagctcttcacagattccccgttctgtcctgccggttttcatgttaaccacaatctgtatcttctgtttcaggtggtcataggctatgaccttgtcaaagagcatcaggtcaaagtcatttgcaccgcctctgctgatatgaagggtgggctctgcgtactcaatcattgcatatgcaaaataccccacaaatccaccggtaaagggcggctgccctttcagccggggcgccttgaactgtgccaatatctcacgaagcacatccatgggatgatctgtttgtatttccctggatgggaaccggctgacatggctctcaatcttcaccttcccgcagcggcaggcaacgcgcatcaccgggttatatccgagaaaggagtagcgtccccatttttcgccgccctctatgctttccaacaggtaaaaacggctgctcctctccgctatacgtctgagcagtgttatgggggtcactacatccgcgtaaatctcgcggcagatgggaattatatcgtattcccccgacagacttaatatttcatcacaagctgggattatcatttaccttaactcctttccttcaaaccggctgtttattctgaacccttcaccatccccgggtccgggcatcacattcatcaaaaaaagaagcccttatccctgctgactacatctgtaatcagcagggacaaaagcttcttccggcttctgcggtaccaccctggttggcgctttccatgtcctgcactctccccgccattctccggtctgggaattaaaaaagcatcaagttaaaattaacctgatgctgtgtcatcgaacaaagaaataaactacgcccgctctgcaacgcaccatcatgcgttctccctggtaacggtgggatacccgtcagcccatactcccatcagacatatctctatgaccctggtttccagctgccctcgcaggtccattcagactctaatccaatgctcccttacaccggccggaagctctctgcgcctggaattacaatcttacttactcctgctcaacagttttttatgttttgttgaatgttgaactcattataatcagcccatttccaaatgtcaatggtttttttgaaagtttttatattttttccattttcttacaccgagccggcccgcaggtcctgcccggacagccgtgttatctcctccattgcttttaccagcttttctgtggtctcccgtatattcggcaccccgaatatgcctgaaacaatggctgctcccgctgcatggctgccggccagacgtcctatgttatccagacagattcctccgatggccaccaccggaatgtccacacagtcacagattgcattcagggtctccattgtcatgggacgcgcatctgcttttgtgctggtgccgaatatggccccgctgcccagataatcc

SEQ ID NO: 3474 - DNA, 360 bp, Unknown
  gut microbiota DNA sequence
cccgatagccaccacaggaatgtccacacagtcacagattgcattcagagtctccattgtcatgggacgcgcatctgcttttgtgctggtgccgaatatggccccgctgcccagataatccgcacctgctgcctgggcttttctggcctggtccactgtttttgccgtaactcccagtatacggtcaggccccagaagccttctggcctcagacgcctccatatcgttttggcccacatgtaggccgtccgcgcggcaggccagggccagctccagattgtcgtcaatcataaggggcacattatattcttctgtgattctgcggatgtcccaggccgttctcagcacttcctcaaaatt

SEQ ID NO: 3475 - DNA, 182 bp, Unknown
  gut microbiota DNA sequence
ttcccgctaaggaggtgtatcctgtcttgcctgcaaaggcgccgggataatatacggcttcatttttatttagcatcttgtggtggttggccacataacctccctccggtgtccgcttggtgggagccagctggtagcttcgggtgccgttgatggtgagaaattccgggttctggatggcg

SEQ ID NO: 3476 - DNA, 294 bp, Unknown
  gut microbiota DNA sequence
agcagagacatatactcaggcagttaaaagcaaatgagtgtatcgactctgctctttattttgaggagagccggaagattgaacgagagctaagcagatgcaggtcagaagagaaacagctgcacagtagaggtacccaccaggataccatcacaggattacaggccaccctgcatcagctccagggatatgatgggaagatgcaggcgttcgatggtgaccagtttatcctcctggtccgggaagtctcagtgggaaaggaacgggagctgggcttccatctgcggtgcggac

SEQ ID NO: 3477 - DNA, 145 bp, Unknown
  gut microbiota DNA sequence
ctccctgtcctccatgaggcggcgcagcacagcaatccgctgtctggccatcaggtttccatgaatgtccgcactgtaaaacagcaggtccttggcaggatacagccacacccggctggtaaagctgcgtaaatcatcgtagatt

SEQ ID NO: 3478 - DNA, 227 bp, Unknown
  gut microbiota DNA sequence
ggaaataccggtatatttcatccgtatctcctggggagaaatcttctttatttcacaaagtattcaggatattgtctccgtcctgagatattcttttagtttgtccatatattcctgtgaaatactttcgcaggccagctttaacacggcattctccagcatcaggcgcatgaaccgggattctccaatcagttcatagtcaatctttgcgatacaacttcctcttt

SEQ ID NO: 3479 - DNA, 206 bp, Unknown
  gut microbiota DNA sequence
aaccaggagaacacaggtacacggaacccacaggcctgtcattgtacgtatagctgatacaggcaatggctgtctggggatggctgccgtccaaatcataagtaagggcggactgggtgtcggtgaagtcggcatccctgggtatcaccacgcggccgctccggtccagctccagggatatgctgtcgccggaggtcatgccggca

SEQ ID NO: 3480 - DNA, 380 bp, Unknown
  gut microbiota DNA sequence
taagatccgtcttcattaaagtaataatccttcactcccttttctacccatcctgtctgtatatatccgttttcgtcaaaagaataggtaacaccatctatatcctgaaatccatttgaaaaatatgtaccatctgtattctgataccactttccgttagcatcctcatgccatccggctgtcatcgcggcaaccttatctgtatctgatttacccttcaatggctgtctcactgcagcatcagaatttgcctgaacttcctctgtatctgcctgagcctgtacagtctgatcactgtttccgcctccggctacatgatgtgcgatcggaataataattcctctcaccataaacaccaccgccagaatcatgccaataac

SEQ ID NO: 3481 - DNA, 527 bp, Unknown
  gut microbiota DNA sequence
ggacgtattcaccattactggccgtggtactgttgctactggtagagtagagcgtggtactctgaacctgaacgacgaagttgagattatcggtatccatgaggacgttcgtaagaccgttgtaactggtatcgagatgttccgtaagcttcttgacagcgctgaggctggtgataacatcggtgctctgctgcgtggtgttcagagaacagagatcgagcgtggacagtgtctgtgcaagccaggttctgtaaagtgccacaacaagtttaccgctcaggtttacgttctgaccaaggacgagggtggccgtcatacacctttcttcaacaactaccgtccacagttctacttcagaacaactgacgttaccggcgtttgcgagctgccagcaggtacagagatgtgtatgcctggtgataacgtagagatgtccgtagagctgattcatccagtagctatggagcagggtctgcgtttcgctatccgtgagggtggacgtacagtaggttccggtagagttgtat

SEQ ID NO: 3482 - DNA, 222 bp, Unknown
  gut microbiota DNA sequence
aagtggaagagccgctgatattctgacctggctgcgggcggtaaggaggtttcaaatagtttggtgcgaaccagaagcaaacatgaatttacggggggattcgcaccggaaaaactgcacagtgagaacggttttggatgtgtgcagggcaggttggcggtgatttgagggagtatgatgtgatttgattgtggaaatgtgatgaagaattgttggtttttt

SEQ ID NO: 3483 - DNA, 259 bp, Unknown
  gut microbiota DNA sequence
ggacgcctcggacacgccacgggcttcgggcagcagctttgacgagattgacgacgcctgcaagaccgccaaaaacccggacgcgacacaggcggaacgtgaaaaggcggctaaggtgttcaccgacatggagggcacggagttgtacgagaaaatgatggaaggctcttcggagataggcatccgcatcaaggggcttatcgagattcggctgaagaaatctgaaaaggagttcgtcgtgccggacaacatcgaggag

SEQ ID NO: 3484 - DNA, 145 bp, Unknown
  gut microbiota DNA sequence
ctgtatatccctggccatatcagccatttccctggccgatgcctggtactgctgctgtgtctgctgcagcggtgcctccgcgtcttccggcgcctgggcgccttcccctacaacaggatatttcaaatcggaaggcacgtcctca

SEQ ID NO: 3485 - DNA, 283 bp, Unknown
  gut microbiota DNA sequence
agagacttacgaccagtggattagcctgctgagccagattttcccggaaaagggtgatacggcggagcaggtgtcccggtacagccagaacatatatgaggatatccagaataaggtgtccggtttaaaggatgaggagaagaaggatatcctgttcctgtttaattacagtgataccaccatggtgacctcgggtaagaaatttttcggacagttctggtgcgacgcagtgggaggccgcaatgtggcggaaggtgtggcggctgagaattccaatgcggtt

SEQ ID NO: 3486 - DNA, 205 bp, Unknown
  gut microbiota DNA sequence
tgttcagagcatacgccctgcattagcaaagataaaagtgtatatgtgtggctggctgaattattacgggattgcggaaatgaagaaccgaatagaagaactcaataagtggctataccacagaatccgaatgtgtatatggaaacaatggaagaaaccgagaaccaaggtgaagaacctgcggaaaatgggagtgccggaagat

SEQ ID NO: 3487 - DNA, 294 bp, Unknown
  gut microbiota DNA sequence
aatcgagtaggaggcggtgattaaccgccgtcctctcacaccaccgtgcgtaccgttcggtacacggcggtttcaacagttgacgtgcactgactgataagctgtggctaaatcataaaagccactgcttatcagtctttcttttgtcattgccatatttaccgctaccgtttgcgtggtaaaccaatatcctctccggctgtttcctgcctgccatgccaaatcttccggcactcccattttccgcaggttcttcaccttggttctcggtttcttccattgtttccatataca

SEQ ID NO: 3488 - DNA, 257 bp, Unknown
  gut microbiota DNA sequence
gtctcagtcccaatgtggccggtcaccctctcaggtcggctactgatcgtcgccttggtgggccgttacctcaccaactagctaatcagacgcgggtccatctcataccaccggagtttttcacaccgtaccatgcggtactgtgcgcttatgcggtattagcagtcatttctaaccgttatccacctgtatgaggcaggttacccacgcgttactcacccgtccgccactcggtatcttgaaatccatccgaaaac

SEQ ID NO: 3489 - DNA, 235 bp, Unknown
  gut microbiota DNA sequence
cagctgcagtatatctgcttccgactcctttgggctcccctttttatactccaccggaaatacccggaacagacccctgtgaccatgtagtccgattccatcctccgccctgtggaactctacaatatcgcattccccgctgacacccatactcctggaatatacgggcaatgccctgcttatcatgacatcgccccgcttttctgccaaatatgggtcatgggcttttttgtgg

SEQ ID NO: 3490 - DNA, 145 bp, Unknown
  gut microbiota DNA sequence
aagcggtgccatgaatcacctacgttaaaggaggaggtcattcaggaagcaatcatgggaaagctgcacagcttgtcaattgaccaggaggaagaaaacttcttaaacggggtaaaggaagatatcctccgggctgccaaggttg

SEQ ID NO: 3491 - DNA, 203 bp, Unknown
  gut microbiota DNA sequence
aatatttctcgttcatgtttcaacaatagctccggtccatacttcccacaaatatttcccggccagtttccgtcaatcagaccatgtaaccgcccttcatgggtgatacggcatgctcggaataaattttcagtacgccctttttatacttggcttccctgggcttccaggcttttctgcgctctgcaagaatacgttctacc

SEQ ID NO: 3492 - DNA, 8204 bp, Unknown
  gut microbiota DNA sequence
gttttattcaaatataaatatttgtttttattctaggatatttttataataaaggcaagaacaaatatatctgactaatgtttgatgcggaggccatgaatgagacatgtaacggaatattccaaacaggaactgaatgatatgttaaaagagcttaccatacagttccaggaagccaggaaattgaatttgaaactgaatatggccaggggaaaacccgcagcagcccagttggatatgaacatgggcctgttggagtttccagagggctgtacgctggaggacggtacagatgcaaggaattacggcgttttagaagggattcctgaatgcaggcgtctgttgggccagcttttgggcctgaagccggaccaggttataatagggggtaattccagcctgaatctgatgtttgacaccatggcgttccactgtcttttcggaacacagggagaaaagccatggagcttctatgcatatgagggcagtcctgtgaaattcctttgtccggtcccggggtacgacaggcatttccagatttgcgaggagctgggaatccagatgattccggtcccgcttctggaggacggacctgacatggagatggtggaagccatggtaagggaggatgcttccatcaagggaatctggtgcgttccccttcattccaatcctcaaggggtatgctacagcgaccgggtggtggaccgcctggcgtctatggagacggctgccccggatttcaggatattctgggacaatgcctacggtgtgcaccatatttatcaggaagtgcccctcaaaaatatcctggatgcatgtgaggccggcggccatccaaacagggcttactatttcttctcaacctccaagataacatttccgggggcaggtatttcccttattgcttcaggaccggacaacatgaaggagtttaagggccatatgtcctcacagaccattggacatgacaagctgaaccagctaaggcacgtgcagtatttcaaaacgccggaaaatatccgcgctcatatggcggatctggcagaggtgctgaggcccaaatttgatatggtgttaaaccgtctggaggaggaactggaaggcagcggactggcagtgtggagccgtccgaagggaggctatttcatctccctggacacgcttgcaggatgtgcaaagcgcaccgtgcagctggctaaggaggcaggtgtcacgctcacaggcgcaggcgcaacctatccctacaagagggatccgcaggacagaaatatccgcattgctcccacctatcccacgccggaggagttaaagtccgccatggacatatttattctgtgcgttaagatagcgggaatcgagtcagtggtgaatcaggggaactaagtattgggatactataaacaggcagcagccgggcagaaaaggagaacaggtatggagaaactatataatccttatgacaatgtgttaaaggtagtaaaggaagcagccgatatactgggctatacggacagtgacatagaggccattaagtacccggagagggaacttaaggttgcgattccggtgcggatggacgatgggacaacgaaggtatttgagggatacagggtgcagcactccacatcccgcggaccggccaagggcggagtgcgtttccatcctgcggtaaatcctgacgaggtcagggccctggcagcctggatgacattcaagtgcgcagtggtgaatattccttacggcggcggcaagggcggcgttgtctgcgaccccaatgagctgtctgaaaatgaaatccgggcaatcaccagaagatacacggcagccattgctccccttattgggccggaacaggatatcccggctcctgatgtaggtaccaatgcggctgttatgggctggatgatggatacctacagcatgctgaagggccactgcatccacggcgtggttacaggcaagccaatctgcctgggaggcgcccttggaagaaatgaagccacgggacggggcgtcatgtataccacaaaaaatatactgaataaaatgggaattccggttcagggaaccacggtagccattcagggaatgggaaatgtgggcagcatcacagccaagctgcttcacagggaaggaatgaagatcatagcggtcagcgatgtatccggtggaatctgtaatccggaaggacttaacgtaccggctatcctggaatacctctcccttaacagaaagaatctgttaaaggattataatgaagagggaatgagccgcattaccaatgaggaactgctggagatggatgccagggtactggtgccggcagcccttgaaaatcagattaacgcttccaatgcacataaaatccgtgcggaaatcatcgtggaggctgcaaacggcccggtggccgcagacgctgacgggatactccaggaaagaggcattactgttgtgcctgatatcctggccaatgcaggcggcgtagttgtttcttattttgaatgggttcagaatatacaatccgtgagctggaccgaggaagaagtcaacgagaagctgaaggatatcatggatcctgcttttgaggctgtatgggatattgcaaagagacagaacgccacactgcgcaccggcgcttacctgattgccgtgaagcgggtagtggaggccaaggcggcaagggcaatctggccataaagcgaatcacagaaaaaatcatagaatttccgaatagcagcagttacacaaagaccaggcactggggatgcctggtcttttactgtgtataaagggggataaaatgtgtgaaagggggagggccctttcggtttttgcaacaatttatttgctgtgtttttcttgcttacaggacacattataatacaggtatattgcaaaaaccattgtcagaagacaaagaaatattgcaattagcacaagctgtgttagaatagggttaaacgcaccggcggcttgcggccgcgcagggcagggatggctgggaatagccggtatttttaaggaggagatccatgtaccaggaagaaagttttaagacgcagagggtggtatatgcccatacgcgcagcgatgaaggggatatggagtataaaatgcactgccatgatgtatatgaggtttattacatgatttcaggcaacgcagagtatctgctggagggcaggacctacacacccaggcccggaagcctgattatcataccgccgggctgttttcacgggttaagggtgctggattcggatgaatataaccggatacgtctgcactttgccgccgaacttctgcaggaagaggaacaggctcttttgctggagccttttggaaccggatggtgctgctatgaggaacagtttcagctggagtggtattttcactccctggaggagtgtggaaactatggaaaagatttacaggatattgcaatccgcacacgggttctgtctcttttgaccaagatttttgcaatatatagggaggcttcaggaacttccaggggaaaggaaggacaggtccaggaaatcatccgctatatcaaccagaatctgtccgctccgctgagcctggaaggtctggcacagaccttctatatgagcaaaaatcatctcacagctgtatttaagagggccacgggaaccacggtggcccggtacatcctatataagcgcatggccattgtgagaaaagagctgtcaatgggggtgccggcagcagaggcagcgtccagagcgggatttggagactactccagttttttcagggcttacaaaaaaatgtttggatgcgcgccctctgataaaagcgcgccgggaatgcctgagatggataagggaagtatggtttgagaatgcgcggggactcaaaaataaggtttaagaatgtacgtaaataaattcttgacaggaaaaaaataccatgatattatcaattaaacctatagaaatagtaggaattaagagacggaggacaatatcatgggagagaagcgtaagagatcagacagacattttaaatttgagacaacccagcttcacggaggtcaggagcagcccgacccttcaacaggggcaaggtcggtaccgatttaccagacatcatcgtatgtatttgataactgcgaccacgcggcggcacggttcaatctcagcgacccgggaaatatatacagccgtcttaccaatcctaccctggatgtatttgaacagagaatggcgcagctggaaggcggcgtggcagccctggccacggcttccggggcagcggccctgtcctataccttccagaacctgacacgggcaggggatcatattgtgtcttccggccatatatacggcggcacctacaattacctggcccacacctttccggaatacggggtggagactacatttgtggatccggctgatttagaggcggtagaggcagctatcagggataatacaaaggctgtctttatagagacactgggaaaccctaattccgatattgctgatatagaaaaaattgcttctattgcacaccggcatcagattcctttggtaatagataatacctttgcaacgccgtatcttgtccgtcccattgagtacggtgctgacatcgtggtacattcagccacaaagttcatcggcggtcatggaactgcggtgggcggcgtgattgtggacggcggaaggtttgactgggctgcttctaaaaaattcccgggactttcagagccaaatgccagctaccacggaatccgttttgcccaggatgtgggagcggctgcctttgtcacccggatacgggccattcttctaagggatacaggggcgaccctctcacccttccacggctttttgtttttacaggggctggagacactttccctgcgggtggaacgccatgtggaaaacgcgcttaaggtggtggaatatctgaatgcgcatccccaggtggaggcggtccatcatcccagtgtgtgccgggatccggtccagcagcagctttacaaaacgtatttccccaggggaggcggctctatttttacgtttgaaataaggggcggggctgagaatgccaggaaattcatcgacaacctggaactgttctcccttcttgccaatgtggcggatgtaaagtcactggtgatccacccggcctccaccacccattcccagatgcatgagaaggagcttctggaacagggaatccgtcccggtaccatccggctgtccatcgggacagaacacattgacgatattttggaggatttggaggaagcgttccggtccgtatagcattccggttcatttcgtattccggtccatttcgtactccgatccgtttagcaaaggtggttcagattaaatccatgggtacgaccggggctgcgtgcagggaaaaaatcagcaggtgaaaaacagcaatacagattgaaacgccgcgggaataaggctataatggatagaaaatacaccgctaaggagaaggacatggattacaggacatatttgaaaaattatccggataaggacggccgtttcggcgcttacggaggcgcttatcttacagaggagctgataccggcttttgaggagatcgcggatgcataccagaccatctgccattcttcccagtttatcaatgagctgagacggattcgcaaggaattccagggaaggcccactcctgtttaccactgcgaacgcctgtccgggaaaataggaaattgccagatatatctgaaacgggaggatttaaaccacacaggagcccacaagctgaaccactgtatgggggaaggacttcttgcaaaattcatgggtaagaaacgcctcattgcagaaaccggagcagggcagcacggggtggccctggccacggcagccgcgtttttcggtctggagtgcgagattcatatgggcgaggtggacatagcaaaacaggcgcccaatgtcaccaggatgaagattctgggggcaaaggtagtgccggttacccatggccttaagacactgaaggaggcagttgactcagcctttgagtcctatgccagaaattacaaggattccatctactgtatcggatctgccctgggcccccatcccttcccgcttatggtcagggatttccagtctgttgtgggatatgaggcaagggaacagttccttgaaatgacaggcatgatgccggacgaggtctgcgcctgcgtgggcggaggcagcaattccatcggtatgttcatacctttcctggatgacccggtggatatcacaggggtggagccgttgggaagaggcgagacgctgggagatcatgcagcttccatgaaattcggtgaaaagggaattatgcatggatttgagagcattatgctgaaggatgaaaagggagagcctgctcctgtatactccattgccagcggactggattatccgtctgtggggccggagcatgcattccttcacgatctgggccgggttaaatacgatacggtaagcgacgaggaggccatggaggcatttttcaaactttccagatatgagggaatcataccggcagtggaaagctcccacgcggtggcatatgccatgcgcagggcaaaggagatgcggcagggatccattttggtgtgcttaagcggcagaggcgataaggatatcgactatgtggtggagcactatggttatggggatcagtttatggattaatttggcggggaggccggagggcctcccttttttggctgaaggcggctttagaatgatggttattccgcctattaccaagcaatataggattttagtgtataattggaatataggctgcctttagatagccttcttccggcatcttttttattgtatccaagtaatcctctaattggtcaaagcggtgtgtaatcagcttttcaaatggaatttccttatatttctttaataggcggaatgcactgtcaaaggtagaaggtgtattggcaattaaaccacagatacgagcattactctcaaaaagaagcttgggaagacataccgtcacctcatgcgtatttaacatactcataggcaatccgacttctatgtaagttcctaactttttaaccatctgcagaccttgaatggtagcgctccagtggtttgcacattggagaaccacatccgcaccgccgtcagtggcttcgataacagcctttatgcattcctgctccgacatacctgaaaggttaatagccacatcaacctgagccaattcttttgctttttccagtttggattctatcatatcggtaatagttaactgttccacccccatatgacgcagaatcatagaagcaatgattccaattggtccagcaccaattactaaggcatgggttttggtggtgatgccctcctgaagggtgccgctttctgtcatggccatttcaatggcgcgcatggctacagccaccgggtccataagggcggcaatctcgctgggcatgtcatccgggattttccatacaaaggtttccgggtatatgtaaacatattccccaaacccgcccttaaaatgaggatataattcagggtttgtgttaggtacatcaggattattctgatgtggggaaggcccgccatagatgaaatcgtcatcacatactccgcatacacccgagccatgtgacatgcagctggggcattttccacaggtgatatgcggatacacggcaattctgtctcccagctttaaatcaccgccgtagcagtgtatgaaccggttggcattttttccaatactgacaatccggcccgcaaattcgtgtccatcacaaaatggggattcgggattaacctttataaagtgtccatctgagccgcaaatgagagcggcttctacctgaattaccattccgtcatctgcggcctccggtacaggatactctttgatgtctacctcataagcacctgtaataacgagcgtttttcctgttttcattcttgttacctccttattgttttgtaataaaaaaagcctttatacgcacaaattgcgtataaaggcaaatcataacctttttgttagtgggaaacaaccagccgtaagttggtacccaaaaccaatattatgtctataatatatagtaaacaatttcaaaagtcaattcttttctgaaaaattaatatctaatcctcctccaacagccattccagaggtac

SEQ ID NO: 3493 - DNA, 2853 bp, Unknown
  gut microbiota DNA sequence
agctaacactttaacctcatagtccgcaacgaagcgggttcctatctcaatacggctgatactgtcctgttctattaatataccctgggtctgtaatctggcagcaagatcatattgggaaagacgctgtcttaaacgcgcctccctgattcggtttccgcatagatttttcttaccattgtaatcgtaaatcttcatctatatggctcctttgccgaataatcatcagtaattttcttgactttaacatatatagaacgtagaattatgttaaaggtcagtgaatgaggcaacaatttccaaaaaaaacatgattatgcacaattattaaagccggacaatctgtgttattggtaaaaaaggggtgaattttgtgaggaaaagtagtcgtataaaaatttatattgcagaagatgagtcaatcatacttatgaatttcaagatgattttgcagcaattgggttatgaggtagtcggcagttctgtaaacggggaaaaagcattaaaagatatactggaattaaaaccggatttacttttattggatatcaatatgccacggctggatggtatctctttgttcgaatcagtatcgaaggcatatgatgcagcctgtatttttattacaggccatttttcagaggcattcgtcgaaaaggcaaaaaaagcaggggcattaggatatttaattaaaccagttgatgagaagcagctgaaggcatccatcgaggttgcggtagcacgttttgatgagcgttgtattctcagggacgagactgaaaagctaagggcagacctgtcggacaggaagtatatcgaacgtgccaaaggcatactgatggattcctttgggctgaaggagggggaggcgatggcaaggctgcagaagcttagcagggataaaaataaaaagctggctgtcattgccagggaactgattgagaaagaaaaaatcatgatgagatagataccagggagaggcagaggatattttggcttgtgtagaaatcagaaagctatatggcggacagcggggaaccagagttaggggatttgatcttgtaatacaaaatccggagatacatgtaatattgtgtaccagcatatcggcattggatgaactggttcatattatgtacgggacagctctctataaatccgggacttttaaattgaatggaaaagatgccatagggcttaggaaaaaagagatacaatatataactatggatacatacctgtttcctggatttacggtaatggataatatttatatggcatctcctgaatatggattcatgaccaggaaaataatacagaagcggtttgacagtctcatgaaggaggcggattgttatataccaaatgtgagagtggagaaccttacagcagaacagaagaaaatggtagaggtgattcgatgttatgaggagcatcctcagctgttgattgttcatgaattggctggcagtctgtcttaccgaaatttgatgtgggctaataccttgtttacaaaattaaaaaacagcgggacgacagtattatatttgacaagcaaatgggaggacatgctgaaaataggtgacaaggtatctgtactgcgttctggtaagaatctggggacatttagcaaggaggaagtactgagtacccctcagaagacatattatctgatgctggggggacagactatggcgtctcttcttgaacccatgaatgaagatgaaaatcaggattttgtacatacaatagtatccggagtaaaacttttgtcacaggacagtgacagcgaaaacgtattgaagttttttatgcgtcaggtaagtaaaagtctaaaggcggtcaacagtattgtatatttttcggatagaaattcttcaaaagtacgttttatatcaggtgtggattaccatggagatgaacttccgcttattaaacctgatattgtaaagcagatatcttctacggaagagcttttttacaccaattatctggatgttcatctgggagatttgctgaatgaccgaatgaacacacatctgatacatactatgatatgtattcctgttaaattcggtgataattacctggggcttctgcaggtgtattttgatgatgattatgcatatacacagacagacaaagattatctgttggcaattgccaatgaactggcatttgccatcgaatcatttcggctaaagggaaagtctgtcctgattcaggagagccaccacagaataaaaaacaacctgcagatgattatatccttgatggaattacaaaaatacaggttattacgtaccggaactgatgtgtcatcggtacaggtttcagaagcgtgggaaacagtggtaaagcaggtaaagagtatagcatcaattcatgacatgctttcgaaggaggaagagacagacagtattatgggggttgatgtcatcattagggctatcaaggagttttattccaatgatgcagatatacaaacggatattgtaagatgcatcatacctcatacgagagctacttctctggctcttttggtaaatgagctgattagtaatggtgtgaagcatgcggaaagaaaagagggaaggcttaccatatgtatgtcactaagacgggaagaagacaattacttttttatttatgaggataatgggattggctttccggatggttttgaaccgtggaaaagcaccggaattgggatgaccattatgcagtctattgttgagcaggaatttgagggaagctttttgtgcaggaatcatcatggtggagcacgtatagagataaccataccatatcaaaattttgtataaattacgtatcttataaataataattaaa

SEQ ID NO: 3494 - DNA, 6778 bp, Unknown
  gut microbiota DNA sequence
aaaaatgtaagaacaatataaatatgagacaggaggagagattcttgaatattgcagttttaatgggagcattttttgtattactttttctgggagttccgattgcatattcgttgtgtctgtctgcagtgctttatatggcactttttatggatgtacctatgataatcataggtcagcagatgctgaaaggggtggactcatttacactaatggccataccgttttttgtaatcgcaggcggactcatggaatccggcggtatttcaaaacgaattgtgaactttgccagaacagtagtaggtcatttgccgggaggtcttgctattgttacggtggtggcgagcatgatttttgcagctatgacaggagccggggcagcgactaccgcggcagtgggaggaatcatgattccatccatgcaggaggaagggtatgacggcggctatgccagtgcagtccaggcagtgggaggaatattcggaccacttattccgccaagtatacttatggttttatatggagttgcatccggagaatctgtaggtgatatgctgttggcaggacttgtgccaggactttttcttggggtaatcgtcataggggtagtagtatggcagtgtattaaaaagggatacaagggagtaggccattttagcctgaaacgggccgcaaaatcatttttagatgctatatgggccatacttgcgcctgccattattttaggcggtatttattccggcttgtttacgccaacagaggcatcggccgttgcctgtttctattgcctgatcatcggattgttcgtttacagggagcttaattttaaatctctggggaaagtggtatttaaatcagtcaagacagcagcgggtatcatgcttattgtggcagctacccaggcatttggatgggtcctgacaagagcaggaataccccagatggtggcagaaggatttacttctgtaatatcaagcccgactgtgtttatgtttgctgttgtatttattctgattgttgcggggtgtttcatagatgcagtgccggcattgctgatttttgcacccatattgattcctacagcaacccagtatggaatttctttgattcatttcggcgtggttatggtggttaccttatgtattggactggtgacgccgccggtaggaattaacctgtttgtggcatcttctgtaggcggacagcctatacataaaatcataccgcatttgccggtacttattgcctcaattatagcaggaaccatagcaattgtattaatacccggcatttcaacattactgccggcgttaatgaaataaaccataggaggattttattatgagaaagactgtaatgtatatgttattggcagcagctgtattaggtatgggaggttgtggtaaagcaaatcaaccagcttccgctgataatggaggcacagaagcaaaaaaagcagaagcagcaattgaactcagtgtgtttgccggttctgtggcggagaacacgcccaccggtaccggtttaaaagctatggtagactatattaatgaaaatggcggcggtaccctgaaagcgacggattattatgatacagctttgggtgatgccacatccatggtacagggacttcagcagggaacaattgatatcggggtatccggcactgcctatttttctggattggttcccgaggtagaggtatttcagcttccgttcctgtttgacaacctggaggaggccagagcagctgttgatggggctgcttcagaaaaaatatttgagaagtttgccgaaaagggaatcgtgggattggctttctgggaaaacggtttccgcgaactcagcaataatgtgaggccggttacgacaccggcggatttaaatggcattaagatgaggacactgcccgcaaccgtacaggtagaaacatggaaggccttgggagctttgcccacaaccattgacgcatctgagttatatacggcattgcagcagggtactgtcagcgcggaggagaatccgcttcatgaaattgtgtcaagaaagttttacgaggtacagcagtatataacgctgacagaccatgtttacaccccgttcatgatgggaattagccaaaaaacatgggataagctgagtgaccagcaaaagcaggttgtcatggatgcggccaatgtaggtaaagaggcccagaggaaagccaatgaggaaaagacaatagaggcaaagcaggtgctgctggacaatggatgcgagattgtggaaaatcctgataaagaagcgtttaaagagattgcagtgagcgcctggaaggtatttacagatgaaaatggtacagagcttctcgacatcatccagaagaattagagggggaattacagaatatgagaaaaataactgacctcactctgccagtagtggaacattggcgctatggaatcaagtttgaactggccacatcccatgccaataaagaccgttggcagacaacaaaatataatttgcagtcacattggtttacccatattgatgcacctgtccatcatgacccagacggtaagaatctggacgcatacccaatcatcgactggtgtatttcggattgtctgattctggatttatcatttgtaggtgataatgaggcaattacagcccagatgttggaacaggcaaacgaaccctttaaggataaacattatgataccattataatccgttctgaccgtggacgaagggtatcttgggagtcagtggaattttgggataattcctgttgggtcagcgctgacggaggaaagtggattagagactataatcctaaagtggttggatttgacttcccccaggattatgaaatacgcaaaatccgtactgcaaaaccagaggatccgattgtacagccggtacatgatttcgtcctgaaagaggggggaatattaatgattgaatatctcaccaatttatgggaagtagggcagccgacttgtcagctgattgcgctgccgcttaacacaaaaaatgcggatggctcccagataagagtaattgcggtgacagaacaaccctaggaggaatggaaatgaagggattggtttcaaagcttgattcaggggtaaagagtatatttggttatgtgggaattataatgattttaattgagacctatgctgtctttgcccgtaatgttctgaaggctccggcgccatggacagatgaaacactgaaaatgctgtttgtatggtctatatttgtttgctccagtctggcttttatgggcgatgagttaatcggtctggatcttattcaagagaaaatagctgataacagaaaggcttatggaggtttaaaaatactccaatatgcccttggtctggtattcggagtcctgacgactaactggggtcttaatatcattttaatgcagctttccacaaatgaaaagacagctgtcgttaaatatccgttatggataattaatatgggttttctgttaggaagtgtgctgctggttatatttgccttatggaaaatatacgattgcaggaagtattttaaggataatactgctaaaaaagacgggaacagataaaaaatggaggcatcgctcaatcatccgtaacagatgactgaacggtgcctccgtttagctgcagccttatgaagttaatattaagctgcgctttggagtctctccaaaggcacactgccaggcaccttcgttgttctgctctatatcctcactaaatgatacttcacctgattcgccgtcagcagctgtgcctcccgctgatggcaggtaaacacaataatctgattatcatacgccttcacaagccattttaacgctgtcttcagacgttcatcgtcgtacagaacaaaactgtcatcaaaaatcaggggcatggtatcccttcggccattctggaccagcttggcggcggccaggcgcagggccagataaatctgatccatggtgccgctgctgacctgctctatgggaaccagcttggacggcgtgttcatgaatacatccaggttctcgtcaatgctcatgctggtgtaaattcctccggtaataccggatataagatcagaggcctccctgttcaggtataatccgaaggagtcgcggatggaggtggacagggtggtcatggtgtcctgggccaggtcgatggcgtccagttcctcctgaatgcgttcattctccgccagaacatgtttcagggcttcggccctggtcttgcagtcagccagatgttccagcttctgttccagctcccactggatacgctgctgctgttctatctcctcggaaaactggtcctcgctggactggagctttccaatctcctgggataactgcaccagggtctgctcggactgctccacagccttgctgagccggaggaattccgccatccttccctccaaggcattcatggcatcctgggagatgctggaatcgcccagatgacgggcgaatatttcctggagaaggcgggtgctggtgtccagttcctttctaaaacggcggttcttgcccagcttaaggattccggttatacaggcagccagggcaatggcgcctgatatccccgccgcggctgtaaggggaaacggaagaagaacaagggagcggaccatctccggcgcggccaggcacagcccggcggctcctgcgaaggccagggtaatgaggaacatgaatacagcacagaccgttctggattttttactgcaggcagccagggtgttctggtactcaccgtaaagcttcctggtgtcctccatgtatttttgtacggattcctgatctgtaaactggctgtttaaaagaatctggcgtccttttgcagacttttcaagcagcccttctttttccttctgacagcactccagctgctttttgatttcactcttcttattgcggtactcaattaactggttggcatactgaggcgcggatatttcctgctccgtcttgcgtatatcacctaaaagggctgtataactgcgcgctgcctcaggaaccacctgattctccagctcccgcctctggctttttaagtatgcggtggccttagttatattcagggcaatgctgccggaggtattgaggttggcgatataattgcgcagctcagctaccatgcccccgtccgtggcgcactttaactggccgatgctgatggtgttgtcgtaggctgtttctgacaggccgcagcggagctggtctaagagtgctttggtgggctccatctccctgccctgagtttcattgacaatggtcagctccttgttctgcttctgaaaccttctctggatacggtatatctggccttcgctctccagccgcatccatccctcgtaggtgccgcttcccttccatggctcgtatttgctgtagacatcattcctggcagcccggcctctctgtttctcaatgccaaagagcattcccctgataaaggtatgaagggtggatttgccggcctcatttttgccgtacactacattcagcccgtccttaaaggagatatccagatcgtggaatttaccgaatccctcaatgtgcagacttaatatcttcatgggttcagctcctttcatcggtggtatgcagaagagcatttaccccgtaatacagggccttcttctccaccggactcatatcttctttttgaagggcctggatatagaatccaatcatatcgctggagtgctcggcaaacagtgctgaaaaatcatactgaggttcggaatcatcaatgatttccgcaattctgtatctggctgagagctgttccaggtcaaattcaatgtcaggatccctcatgcccctgattcggaaccggtaaatatgctgagaaccccggttttcaatttcatttgatatccggtcgcacagttctccgttagtggtgtccttggacacattcacggcaagcggtatgtactggaggctggcggcgggaatgaactggaggtttatcagttttctggtgacaggatgaatctctcctgcatagaagccatgagaaccggtctcggtcagatccaggggttcaggtgagccgcagtaagcaatctttccgtctgccaggacatgatgtttgtggatatgtcccagggcaatgtaggaaaatggggacagctccaggctgttgaaattgattggcaggtgggcggcgtcgccgccatgggccatgaggatttggatacggctgttcaggggaacctgtatatcctccagcaggggcgccttgatttcagccgtatgatagctgaatccatggacctccgtgttaatatcctcaaaatagacagaggtcaggtcttcatccattatgaaggtcacgttgggactccaggtaaagcttaacagggcagaattctccctgatgcggtcatggttgcctgctatcaggatgatctttacagacggaatggtggagaagagataattgacctccttaaggtctttcatcagcggctgcctgtgaaacaggtctccgctgatgaataagcagtccacatccatctcttttgtcttttctatgattatccggaaggtatctttgatggcctgggcgcgttccttgccccagggcttgtttgcatcgggacacataccccagtggatatccccggtgtggatgaatttcatgtctgcctcctgtcaaatgttgagttcccgaacgctgcgctgctgcgtccgggcagcaaatatttgcccgctggcgctgggcaggcagagacgggttccccgaac

SEQ ID NO: 3495 - DNA, 270 bp, Unknown
  gut microbiota DNA sequence
ctcagaaaaagagcctgcagttattgcaacgagcttgcagcagtatacggtgatggatacagccctgcggtgtcaaattacaggctccttttggatattatacattttttgagggaggggacaccgattctctgaccgtgagtttcgtgccaatgcggattttcctggagcggaattcctgggtggatttgtccgggttctgaatcattcgcatcagttcgtccacagactcccctgccaggccctgtttagaaacattgatggaagtca

SEQ ID NO: 3496 - DNA, 145 bp, Unknown
  gut microbiota DNA sequence
cgtgtcgccgatggttgtcccatgggaccggtccgaaaggaggtaattgagcgccgtggtataggcataggctgcgtatgtacccaccggcgcgttaaagctctgttccttgccgtaagattcaaaggcaggcgcgttaaaggaa

SEQ ID NO: 3497 - DNA, 404 bp, Unknown
  gut microbiota DNA sequence
gatccccttcattccaaaaagaccgcttccccggaacagattgtggagaatcgtctccacctggtccccgctgtggtgggccaccgcgattttcacgggactgagactgctgccagccaaaccgccatctgccgaatctccgtccgccaaatctccatctgccggacctctgtccgccgaaccgccatgtgcccaatctccgtcctgtccgctccgggccccgctggcccggtcctcgccttcccagtccagggcctccttttccaatgcctcatagcgcagaaaacgcccggcctcctcctcagacatgcccttttcagccgccaggccgtgcacatctacctttaggatatgacaggggacatgaagcccttcacacaatgacctgacaaaatccgcatccc

SEQ ID NO: 3498 - DNA, 492 bp, Unknown
  gut microbiota DNA sequence
tcctgttttaactgccgtatcacaaagagaagggtataaaaggccatgaagcctgacacagcaggcgcgattagtccgatgacaaacagattgtccgggcagtaggtgtaggcaagccatatgagaggcattctgaggaccagggcgccgaagcagcagctgaccatggtaaatactgtcttggaacggccgttcatgaagccgttgagacagaatacaaaggatacagccagataatcaaagctgcaggactggaagaagggaattcccgcctcgatgatttcagaatgggtgttaaagagaccaatcatggtatggggagacagctgggcccacaggaaaaagacagaggatgccaataccgcaaatccaatgccggctgccagggactgccgtgcccgttcaggccttcccgcgccatagttctgggccgtgatagctgccagggcgctggcaatggaagtggcagggagcatggcaaacacgtcgtat

SEQ ID NO: 3499 - DNA, 2423 bp, Unknown
  gut microbiota DNA sequence
actgcgatgtgtaagcttcttagacactgcgagacataagctccttagaccctgcggagtgtaagcgctttttggcgttctgtcctgtcctgttttaactgccgtataacaaagagaagggtataaaaggccatgaagcctgacacagcaggcgcaatcaacccgatgacaaacagattgtccgggcagcaggtgtaggccagccatatgagaggcattctgagggccagggcgccgaaacagcagctgaccatagtaaatactgtcttggaacggccattcatgaagccgttgagacagaatacaaaggatacggccagataatcaaagctgcaggaatggaagaagggaattcccgcctctatgatatcagggttggtgttaaagagaccaatcatggtctggggagacagctgggcccacaggaaaaagatcgaggatgccagtaccgcgaagccgataccggctgccagggatttctttgcccgttccggtttccctgcgccgtagttctgggccgtgatagctgccagggcgctggcaatggaagtggcagggagcatggcaaacacgtcgtatttgctggcaatacccactgcggcggctgcgtttacccccagacggttggtgactgaggtcagatagagaaaggacagccgaaccatgcattcctgggaggaaatggggattctcaccattgacagctccttcagcctgtccctgtcaatgcgcagattcttaagggtaaaggtaaatatgaacttcttcctgttaaggtagataatggagcatatcatgctgatggactgggagaggacggttgctagggccgtgccggctactcctaatttcagatactttacaaagataatatcgcccgcaatgttgagcacacaggacagggccacaaaatacatgggcctgcgggaatcgccgtatccccgcagtatggcacttatggcattgtagccgcagatgaagaatatgccgcagaagcatatggttacatactgtctggcctcatccatggaggcggccggcgtccttaaggcagtcagtatggtgtctctgaaaataagcattccaatggtcagcaccaatgccacaattgcaaatacggacagggtggtcccgatggtgcggcaggtcctttcatcatctttcatgccggtgtatttccccaccagaatggtgccgcccagagtcaggccggataccatgctggtgatgatttgggttacctgggttccggtggacactgcggccacactctcaggcgtacagtaccacccgatgaccataagatccacggctccataaagggcctgtatgatattggcaatcaggaatggaacggagaaggccagcagtacgtgaaatacattgccctctgtcagcagattgtggtttttcatgatgaatctctcctcaatataacatttgttaaaaataaaaataaaccctccagttactggagggtcaataagaaacgcttatttaatttaaaaatatttattccattaagaaatatttattctttcatgcattttaagtatggaatctgtatttccgtcacataccgggatgtatcattggtaaaacctgcatcaatcagtgtgatttccacggaatccccgcagcaggcatatcccatctggtccatatactccaaaagctgtatgtagtactgtgacgcttcctggtgagtgccggaaaagcgcacgctcacataatccccggcctgaagatattgttcctcccccataaagtggtcctccttctcaagaagtacgaatatacctgaaaatgattcaaatttccgggccttcagattggcggcggacagggaaacgcctaccttgcccagaaacatcacgggttccagggtattggctcgttccagctcgcgaagtgagaattccaggtcctctcccagcctgatatccttcctcagatacgcaatctgtctttggtcaaaatgaagggtcctaatctcaccgcattgtgtatgaaccgcgtcctccagagctttgagacggtattccagcttctgttcaatctgtgtcagttcgctgatttttgcctgggtttcggccttctgctcttttagaaggtcaagcatgatatccacatccctgttttcaaaaaacaatgcgatcttctttagggatacgcccagggcccggagatacttgatggtgttcaggcgttcaaactggcgggtggagtaatagcggtatccggtatccgggtccgctgtctcgggatgcaggattccaatttggtcgtaataccgcagggtgcgtatgttgatgccgaacaggtcggccatttctccgattgggaaaaggtttttcacgtttattctccactttattcttcaattacctggatttccaggaagtcaaaatctacggattcaa

SEQ ID NO: 3500 - DNA, 4075 bp, Unknown
  gut microbiota DNA sequence
accgatttcgtcgtaataccgcagggtgcgtatgttgatgccgaacaggtcggccatttctccgattgtgaaaagatttttcacgtttattctccactttattcttcaattacctggatttccaggaagtcaaaatctacggattcaataaaattatcctgtgtgaatctggctttatcatggtacttaaattcctttacagtagagtccagccagatgggtttttccagatcaaattcataacaaatagaatccagggaatcaaagaccatctgggttctggataaggaatagtcagatatgcagaccaccgtatcttttaaaagatggttgtctttcattaattttccccacattctgaacataaagcttctcctctcgcaaacgattggcggacatataggtttctgatgttttagtataacatctaatccggtgttttaaaagtcattttttaaccagtattgtttacggtacctggaaggcgaggtttgggtatactggttaaatacccgttcaaagtaggttatattctcgtaccctacggattctgatacttccgtgatgctcatggagctgcctgacaaaagctctctggcgcggcgtatccgtatcatattaatatactcatttactgtgaatccggatacttctttgaaaatacggctcaggtaacatttgttgacataaaaatggtctgctatcatctccagggacaggcggttatcataatggccaataatataagaggccacttcatctacctttctgtgtttgggttgggtagacaggggaaggacgggagatagagaagaaccagacatatgcctttgggcaagaatgaaaagccgggacaaatttgacatggccatatgcctaaatccagtctttttttcatgaagttccttagccgcatcgtccaacaggcactcagccagaacctgttcttccgtatccagggtaagtataccggaatgacagcggaaaaagcccggcaatgacatctcacctgtagatgacaggaattctgagaagggacttgggtcaagggatataaggattcgttcgtgactgcagggaccggcctggctggtctggtgaatctgatttctgtcaatgaacaccaggcttccgcctgttacatggcaggtcctcctgtcaatgaaataataccgctctccctccagcagatagtatatctcatattcattatgaagatgtttgcggggcatggaaaaagcggcatccctgcggatgcggtctatggagatgccgtcggtcttttcagcatatatgatttgttccataatcgttctcctgtatacaaagtacaatgatttataagtaacaggcttgaatgggtcggatgcctgtatactgtcccggatgtatcctggatatatacatcattgtaccttcatggtacctcatggtatataatcaggaatagtaaatataagttgattacaacagaaattaatcaatatagaataagataattatactaaatttatttataatgtccagtgtagattagagtgataagaaaaatcatggagaaaggaaggcatttaaaatgatttgtgaaaatgaagcggtaaaggatgtacagattgcttacataggaggcggatcccgtggctgggccaggacctttatgacagacctggccatggagcccaggctgggtggtaccatacggttgtatgatattgatacagaggcagccagggccaatgaaatcattggaaaccgcctgtcacagagaaaggaggcagcaggtaaatggttatacaggacctgtatgagcatggaggaagctcttacaggagctgattttgttgttatctctatccttcctggaacatttgacgagatggctgtggatgtccacatgccggaacggctgggcatataccagtccgtaggtgatacagccgggccgggaggcatgatgagagcgctccgtaccatacctatatatgtacaatttgcagaagccatcaaacagtattccccggatgcttgggtcatcaattataccaatccaatgtctttgtgcgtaaagacactgtaccatgtatttccccagataaaggcatttggatgctgccatgaagttttcggcactcagaaggtgttaaaggggttggcagaggatgttctgggattaagaaacattaacaggagggatatccatgtcaatgtattgggaatcaaccattttacctggtttgactatgcgtcttacaagggaattgacctgttccctttgtacaggaagtatgtggatgaacatttccaggaaggttatgcggaacgggataccaattgggctaatgcatgttttgcctgtgcgcatagggtgaaatttgacttattcaagcgctttggtttaatagccgcggctggagaccgccatctggcagagtttatgccggggaatgagtatctgaaggaccccgggactgtggcaaaatggaaattcgccctgacaagcgtgaagtggcgcaaggaagatttggaacaccggcttgaaaagagtagaaggcttctgaacggggaagaggaggttgaactgaatcccacgggagaggaaggcattcttcttatcaaagcgctctgtggcctggaacgggtggtcagcaatgtgaatatacctaatacaggaatgcagattggtaatctgccggcagaggcagtggtggaaacaaatgccatttttgagcgggataccatccgccctattctggcaggaaatctgcctgagcatgtgaaggagctcattatgccggcagtggaaaatcatgagaccatactggaggcagcgctcacctgcaatgaggagctggtagtcaaagcttttatgaatgatcctcaagttaaaggaaggaaatgcgaggagcaggatatccgactgcttgtaaaggatatgttaagcgctactaaaaagtatcttccggagcctgctctttggtcatgtccgtaaaatggcgcagtggatccaggtaaaaccggcaatatcctggtgtatggcatttcggccataatgtgttgccggcagtgcctgtgttcgtcatattttggccatatttgaattttttgtaacatcccttgcccgtggggattatttgtagtaagctatacgtaatgataaatgttcccataaggaggaaatgcaggtgggacaggcaattacggattatgtaaagttcctggcagatgccagggatgcggtgtaccgtcttaactgtgaccagaatacggccggccagctggcggatgaggaagagatgaaagagcgggagctggagactgccaagaaggctgtgtctgactccgtgaatcagacgattaagaggcgtttggatgagattaattccagctatgaccaggagattggaaaaggacaggaacgtctcaggaaggcaagggcgaaacgggagaaggccaaaagccagggggtaaaggagcggattgccgaggaaaccagcgagctgcgggaacacaaccgggacctgaaggtccagatgaggacaatgcttcagaagaaccgggtgcctgcctggtgtggcaccactttttattacgctctgtactaccccagaggggtcagggagattatgattttccttcttaccctggtaatctgctttctggtaattccatgcggtatctattttatgattccccagagggttatctggtatctggcggcggtgtattttgtggctgtcattttgtttggcgggctttatgtggtgattggcaataagaccagaatccgtcatcaggacacacttaagaggggcagggatatacgcaaccaccttaggtcaaatcaaaagaaaataaaggttattaccagaaccattcaaaaggatgggagtgaggatttatatgaccttgaaaaatatgacgatgagattgcccgcgttgagcaggagctgtcggagattgcttccaggaaaaaggatgctctgagtacctttgagaatgtgacaaaaaccattatctcggatgaaatcatagccagccataaggacaagctggatcggctcagccaggagctgga

SEQ ID NO: 3501 - DNA, 238 bp, Unknown
  gut microbiota DNA sequence
ggttctatactgaatgttggggtgtgctgaaaagcacacttccaacattcttttcgttgtaataaaatacatctataagaagcctcctaaacgcattatcccgaccaaagtttaatgttacggaggtgaccccttatagatgtaccctaattataccaaggctttccttaacttggaaggtgtttttattaaaaaagtggttcaggcagactctttcattaaaattttcatccagtcc

SEQ ID NO: 3502 - DNA, 168 bp, Unknown
  gut microbiota DNA sequence
cccccgggccacaccggacactgttaccgtgtcctcccgctcatatccctgtgtattgaaaacaataatcttttgttcttccggctcctcccggcgggtatccttatcctgaccgcagatcctgcttcccatgccttctgccagatgaagggctgtctctgcgccgga

SEQ ID NO: 3503 - DNA, 15691 bp, Unknown
  gut microbiota DNA sequence
caattatcgtccagtctatttttattataaatacgttgttttatttatactttttaataattagtctagtatgtagtctatacttcgttctgtattgcgttccccttaaccccatgctataatgtcagcattatgtccgttttccgcaaaggaacgcataacaggagggtaaaaatgagtactggacaaataggaatcctggcagccatcatcgtgtatctggcagccatggtatatgtaggtttttatttcagcaaaaagggcggcggtgattctgccgacgaattctatctgggaggccgcaaacttggggcgctggtaaccgccatgagcgccgaagcttcggatatgagcagctggcttctcatgggcctgccgggagttgcatacctgaccggcatcgcggatgcaggctggaccgccattggtctggctgttggtacatatctcaactggctgattgttgccaagcgcctgcgccgctattccgtagcgtgcggggccattaccataccggactttttctcccgccgttaccgggatgacaggaacatactgatgtgtattgccgccatcgtaattctgattttctttattccctacaccgcctccggattcaaggcagtgggaaccctgttcaacagcctgttcggcgtgaactatcacgctgcaatgatagcaggcgcagtggttattatcggttacacggtcatgggaggctttatggcagtatccaccacggacctgattcagagcatcgtcatgagcattgcgctggttatcattgtattcttcggcatccatgtagccggcggctgggacgccgtgacagacaacgcccgttccctggcaggatacctgagcatgacccatgtccacaacatggctgacaacacagcatccccctatggcttcataaccatactgtccaccctggcatggggattagggtattttggaatgccccatatccttctgcgcttcatggccatcagccatgaggataagcttaagacgtcgcggcggattgcgtccatctgggttgtcatctccatgtttgtggccatcctgatcggcatcatcggatacggcgcctctgtggcaggcgggatccccatgttttcatccagctctgaatccgagaccgttatcatccgtctggcggatttgctgggacgccacggaatcctgctgtctgttgtggccggagtggttctggcaggaatcctggcctgtaccatgtccacggctgactcccagctgctgacagccgcctcaggcgtatcccagaacctgctccaggatttcctgaagattaaaatggatacaaaagcgtccatgacagctgcccgtcttaccgtagtgggcattgccctggtagccatcctgctggcctggaatccggacagctccgtatttaccatcgtatcctttgcctgggccggtttcggcgcgtcctttggcccggtgatgctctttgccctgttctggaaacgcagcaatctgaacggcgccctggcaggcatgatttgcggaggtgtcatggtatttgtgtggaaatacggcgtgcgccccttaggcggcgcctggaacatctatgaactgcttcccgccttcatcgtggcctgtattgccattgtggccgtgtcgctgatgacagaagcgccatccaaagaaatctgtgatgaatacgattctgtgggaagataagattgaatgaaataccaaaaccgcaattttcagataagactgtttccatctgaaaactgcggttttctcttttcctattgctctctcatctgcggcttatcggcccggtgccggcttctctcccgtactttcttagtcctcctgcttgctgcagattgccagcctgtgctggtacttctccctggtagccagccctccccggatatggcgctctgacttattcacatccagcacgattctggcctgggccgccaaggtgggattgatgtgctcaagcctgtcagttacatccttatgtaccgtggatttgcttattccaaacttcttcgccgtctgccttaccgtggcattgtggtctatgatgtaattggcgatggctaccgcacgttcttcaatatactccttcaaaatgagtctcctgaggatttttttacatcatatgcagaaaatcccgggattagcacaccctgtacgttttccggcaggaatattttccgtccgcgcatgtccgcctcaggcggactgtcctgtgccggccggcagagtgcagcttttaaatatattccagcacgccacgtatatccgtgaccactgcgtccgcgccggcttccaagtacatctgccttaccttccggctgcgttcttccttttcctttggggaaagcgccttaaattcctccctggacagtcccatggcagagcttccctcaattactccaactgtaaacagacctgcatttttaccttctctgatatctgataccgtatcgcccactttcatgacccgtcttacatccgtgagccccagaaactgcatgtttctgaatatcatatagggattgggtctgcccttgcggtccacggagtccgggctgaaccagcagtccggcttatatccctttgttgctgcggccgcggcaacaatctccatcatctcatcggtatagccggttgtggagccgatttttattcccatcccccgaagcgtttccacggtttcagttacatagggctttacatctgtaaacctgggaacgttctccagaattttcttctcgcttaactgatacacctggtacacatcctcttctgtaaacggacggccgtatatccgttcccactccgctgtaaggcgctccatctgaagcatggtgcgcacatggtcaattttcagcattcccataggagccctgacctcgtccatggtgggaacaattccaaattcctcaaacgcatccatgaatgcctggaccggcgcaaaacatccatagtccaccgtggtgcctgcccagtcaaatatcaccgcatcaaaggctgtatggcttttttcacgcttttgtatctttttgttcaggaactcaccaatgattgcacacagcctgcggatatcttcctcgtagatttccccaatattgccgattcggaacgtatccgcatccgtcacctttcccggataaatggcatatccccgctccttgatatagtgatacatctcgtcaaaagaaaacgcatggttttcagggtagaagaaggtggtaatgattggtccctgatgccggctgtcaatataaggacgaatccccatctcagccatcagctcaatcagcagcctgttattggaagtatagcgctgatgtctggcctcaattccgccctctgcttccatctcccgcattgcctgggcaaatgccagaaccacatgggttggggaggtaaaacgccatttcccgtccttctccattgtcttccactggtcatataaatccagggacaggcttttagcctttccctcacatgcagccaggcagtcccgcctgcaaatgataaaggaaaatcccggaacaccctggatgcatttgtttgcgctgcttatgataaaatcaattcccagctcttccgccgggatatccacgccgccgaagctggacatggcgtccacgataaaagtgcgccctgacgcctttaccacgcctgccacagaagcaatgtcattcaggattcccgatgtggtctcactgtgtaccatggaaacatgggtaatctccggatgctcattgagcagcttctgaattttatccgcggacggaacctggtcataggtctcgctgtaaagaatataagaaagaccggcatgttctgctatatccgccatacgttctccatacgcaccgtttgaggcaatcagcagcctgtcatccgcccccacagagctggtaagcacagactccaccccaaacgtaccgctgccctgcatcagcacgcaggtataggtatcttcagaaacgcgggccagcttaagcagccctgagcggatttcctgggtaatctttttgtaatcctcatcccaggtgcagtggtcaaacatcatctccttttttacagtgtccgtagtggtcagcggacccggggtcaacagtttataattcggcatacctaattttctccttgtcttatctttctctatttttaatgcttcactttatttcccgcagcctctcttagcagcctttttgccggagaattttttccctatttgcagctttcagacagctcctgatgctttttcagcaagtccacggtcagcttttccggaaacaccctgggataagcggactggttctttgaattgctggtttcaccctcatagattggaaggggataggtggtcagcagctcctgacggccgtttttgataatacactctgccatttccatggccagcttatttgtcttatctcccttgtcaatgacagccgcggactcagtcagggaaaaatttccctcggtgggatccacataatcaacaggaagcccttctgccttatccgcaactgcctggtgacgcaggccgaaaccgacggccacctcgccggcacgtacttttttcaggggtgcagagcccgagctttcaatatgggggcctgcatttttatagattccgctgagaacctcctttgccccgtcctctccgtattcgctgacaatggcctgcattaaaagccacgcagtggaagaactctttatatctgtaacggaaatcaaatcagcgtacgcgggatttaccagatctttaatactggacggcgttggaagctgatgttccttcatcatctcagtgttaagaataatagctccctcctgtctggtaaccgggctgtagtaggccggatatttctccaggggttttgcgtcaaaagtcaaatcaaggaacatgtgattctgttcctgggcgctctccagatagaaggaactcatggtcaccaggtcagcctcgatatccgtcccttctgccagcaatttgcctcccagctccgaggtgccaaaggtctggaataaatattttcccccgtatccgtttccgtccagagcatgcttcattgcctccacggcttcgtcatctgcgttggagtagataatgacctgggcttctttcttttgacagccggttacggcggcagcggcagccagaacagcggccagacatcccatgacagcagcttttttccaattcttcatgattgtttttctccttttgtttttgcagcggcctcctgccagatatccgaacagtccctttgccgccaggttcgttatgagaatcagcagtgacagcacaaaaatctcattaaactttgtgtaatactgcagttccttaattttcgtggtaatgaccatggtcctggctcctgctatgaaaataacagcgctgacagtcaccatggcattgacaaaataatagctgaacacttccagaagggtgcttaccgcattgggcgtcaccacgcggacaatggtcttaagccagctgtcccccattaaaagggctgtggtctcccaggacgcattcatctttgccagggagctcttcatcatcagatagggggtggaaaagaaatgcaccacattacaaatcactatgatgaaaaaggtattctgaatgggcgtcccggaaaatgtaaataaaaatgcaataccgattaccatgcccggaatggtgttcgtgaccagggcaatgctctcaatgacagatttaagccggctgcttaactggctgcgggccgtggccagcgcagctgcgtatgccaccagtgaaccggtgagcgccgtacaaatggataccaggatggagttcttatacacagaaagcagtctggaatccgtaaacacagtttttatatgctccgtggtaaactgcctcctgtagggccattcctccaccataggcactacaaaaatcaccgcaaatatacacagtaccgaagccagaatgagtacggacgccgccccgcagcatatgtcgcggattctcccctttctcagctctatgccggagaccttgctgtagcgtatattaaaccgttccagaaactggagcagggaaatgctcaccaccgacggaaccagcataaacatagccaccacagcccctctgttaaaatccggtacactacccagcatttcattgtagagcactgttgccaccacatcatactgtccgcctacagaagccggtatcccaaaatccgtaaagcacagaaaaaagcattgaacgaaggaagcggccagggtgccgagcagaggcctgataaccgttcccaaaaaagtctttaacgggctgtcccccataatccttgagacaatcatgaacttcttatcaataaaactcatggtgttcagtatcagcataaatgagataggcagcgtgtagataacatatcccagaagcagtccgcaaaagccgtaaatctcaaacatctgataccctatcattcctgtgataaacccctgcctgccaaaggaatagataatggcaaatccgtatgtaatggtgggaagaagcatgggtaccactgccgccaggcgtatgaatttttttaggcctcccggcacattggtataatgtatggtataggccagcacaaaagccaacgctgtggtcagcactgcactgacacaggatacaaagatgctccggccaaaggcagccgcaaatccctttcctcccgccacatccgcgtagtgctcaaggctgacgttgcctcctccttcaaaggattttcccagaagcagtacaatgggaatcagaagaaataccaggaaaacaatgactaccattgcgtaaatctgtttgagctccctctctttagtctttatcatagatttctttgtcctcacgctttcatgctgtgcagctgattctctgactgctgctccgtgtcatttcccggctgaacagagtgaaaatattatttctcttgacctcaagctgatttaaaataaaattcttaacaaagctgtctgcgggctgtcctatgatttcctccggcctgccgaactgggcaatgttcccctcattgacaatcagcaccttgtccgacaaggtcagcgcctcctccgggtcatgggttacaataatggttgtcagcttaaactccctggcaatttccttgatcttctccttgatggactctttaatcacaccgtccagagcgcttaacggctcatctaacagaagtatcctgggcttcatcaccatggttctggccagggccacacgctgcttctggccgccggagagctggtcaattcccttggccagatgttccctcagccccagaagatcaatgagctcctgcacctcctgtccggtggaaatgtcaggtttgttccgcagtccgtaggtaatatttttatatacatttaaattagggaacagtgcgtaatcctgaaacacaatgttgaatccccgttcctccatgggaacacgggtgatgttgcggccttcaaaccatatttcaccgctgtctgcatctgtaatacccagaatcaggttaagaagcgttgtcttgccgcagccggatggtcccagaatggacagaatttctccactctcaatagacaggctgatgttatctaaaattgtaaccccatcgtaagatttcctgattttgttcagttccagcatataatatgctcctttcaaaaattgccccttgctgtaattgtgccgttactcgtttgtccctaacggacagtcaaattaaaacacaacggcagacgtaaactcaacaaaattcctgtaattcttgtgtaaagcccgtgtaaacccgttctggcgcaaaaaaagaaggcttgtagattttctacaaaccttctgtccgcccggcactgcctgatggagcagcagacccgctctagtacgtctggttccgcacaatacggctgctttcgtccagctttttggtgtattttggatagtcccggagaatgatccccgtgtaaatcatatctaccaccgcaatctgggatgtcctggagaaaatggcattgccgtagagctgctgccggttgccggtgcacaacatgatatccgcatattttccaatcagcacatcatcgtaattcgtcagcacaatggtggaagctcccttccgctttgcaagcttcatcacatccactgtgctctttgatgtacctgagtacgaaataccgattgccacatcctgctccccaaggtttcctgcgctgatctgctgaagatagacgtcgttataggtcacacagttaatccccagatacagaagcttagtcaccaggtcattggcaaccgtggctgagttttccacataatatacagccacctggccggcgctgcaaatcatcccggcggctttgatgatttccgaaggtgaaatatgtttaagcgcatcgtccagataggaaatcgtcctggtaatcacctggcccggaacctcctccggcctgtcctcctctgatatgccataaccgcagaccagaggcggcggcacagcccctcctgacccgtccgcccggctgtccgcctttgcatccgcttccatattgcctctgccggaggctgccttcagcaccgcatacttaaattcccggaagcccccgaaacccagggccttcacaaatctcatgaccgtgggctggctgactcccgctgcctttgccatgggaaccagggaaagctcctccaactgtcccgcatatcccagataatagtccgccaccttctgttccgaaggccgtaaatccgcatatagcttctttatattaaattcaaacggtttcgccatgtcccatacctcggtttccagattctccggtcttcagtttcagactcttcggatgcaaataccaatgctctcatgccatacatacacaggatatacacggtactttttctacaaatatccggttctgcacgtttctgccaatatgtcaattcagcttcgcacagataaaatcctctgtccgggaaattgcatttttttcaatacaatgctgttccggcacaatttccctgccaaaacagcattctgtttctgatatatgaagtcctctgtactccctattatagcttatctttgtctcccgcaccacaaaaattgtacttcagccaggaaaccgggggccaatgcaggatttaccccaacaatatctccaccgcctccttaagcgtctccacttcccccacattaccggggaatatgatataaggcgttcccggaaaacggctctccggacctgtgcgccataccggtatgccggggcggatctgtcccaggaccgctgcacgctttacctgcaaagccttggttcccacatcgctggaggtgatgccgcccttagccaccacaaatgccggcctcaccttcagcctgcccaccagtgactggactgcgtcggaaatcctgaccgaccgcaccaatgcctcctcaggactgtcatgttccagggacagcagcttcctcctggtatatacggcgaccgtcaccccacggccaatcagctcctcttcctggcttatcacagaactgatttcctcctggaatctttcctcgtccaggaccaaatcggaattaaactcaatgaacctgattccctcaacggtttttaaagcctccagctggctggttgttttttttgtatgggatcccaccactatgattccacctgtaccgcagttttcctgcaccatctcttccctggacagaaggggtctctcacggatggccccgaattccttcacaaagcctgcggctgtgcggaacataaacctgcgcccctggttcatggcgtcataaagggcaatgcagaacaccttcaggtcgcaggcatccactgcgttcaccacgattttcccaaaatcatggagcgccagcagtttatctgtaatggcggcataatccaggctgcgaagctcctccagggaaacatccagcacttcccgggccggatatcttccccctgtcttttcctccacatattcctttagattggagcaatggtacccaaaggtcttatcctctgcaaattctgtctccccggcaggtatcagctcatttccatactttacatagtgcacattgccgatggtaaaacgcccgccctccttaaaatagggacaaataatttccccgtcaacagcccggcccctgtgcttttcctctgcccgggccagcagctctgtctccagggggtaatgtcccctcagtgtggaatctcccctgctgacaatcacatagtcaattccggtttcctccgacacctttgccgcggtttccccgatttccaggtgggccctggtggtctgttccacggtaaatcccctggaattcgtcagtatgtagaacagcttcccgtcctcttcaaagcctttcttaatactgtcataggaccaatccgtatacacggaaacatcatggaccgtctgcacgccggtgggatcatcgtccaggactatgattttatgtctgtcctgccggcatttttcttccagcagagcctgcacggcgtcggtgtccaccccgggatactggtctaatacagatgcattcaacatggtctgttctcctctctcttatcttccgatgcgaaacagctccctggcctcatccggcagcatgggctctttatccatggccctgagaagcttcactgtcttttccacaaggggggcattggatgttacctgggtctgtgcgtccagataattgctgtcctcaaatccaattcttacggtcctggctcccatgcccagggcaccggccagcagcgaaaaatcctttctgtgggcctgtgtaatgccccacacggcattggaaggaatcatctgtatcatggcagccagggcctggggcgttgccggggcttctccctcatggcccagcaccacactgaacagaaccggatccgcgaagtcatacttctccatcagccgggccatggtccaggtgtggcctatttcaaacgtctccacctccggagtctttttctgtttcagtatttcccggatacagtactccacgtcgtctataggattgcagtacacagcctttcccagattagtggatcccacgttcagggagcaggcttccaccagctcagaatacagaggggcgcagcgctcccgtatgttcaggtccgataccccgcccgtggacacctcgatgatgatgtccgaatcccggcgaatcataaccagcgtctcctctaacagggacatatccggcgtcagccggccttccctgtctcttacatgaaggtgcaccatggcagcccctgccttataacacttatatacatcctccgctatcttctccggtatgatgaccttgtcctctgccgataccggcgcaacgtttaccagaaccttattatccatgtctgtcatttatctaatctccctttttacaatttctgcatttacgcaaacagtacctgtgcaatcagcaccagaggttcatcccctgtctgtgcaatcccatggctgtccccgggctgggctgcgatgatgtccccttcctccagatactggtcctgtccgtttatagtgtgaacggcttttcctcttacaataaccatggtttccatttccccctcatgggtatggatgccgattgaaactcccggattcagcgtatggcgcacatacgctctcccctttcccatcatttcctcctggcctgtgagaagcttctccatccagacggttccatttccgcccatacagccttcaatcggcgttctttccagctcatttttcgttctatatatcataaaaacgctccattctctcaaaaaaataaaggggctgccgcatcattggcttcagacatatcatctgtcctgttccagtcatcatgcagcaaccaccttgctattcatcttttacttttgcccagtactggtaatgttcctctacaatcgcatagatgccggccgaatccctgtcctgcagaagcttcacgattctgcggtgcaggtccaggaagttttccacttccccgtccaggaatatccggtctatggtcaccatacgggaacggcgggtgattttgtccacatagttgcagatggactggagcatcacattttccgtgattcccacaatggccatatggaactgtacatccgcctcatacaggctgcgcgcctggggcttatccatatgggcctggtactccagctcctccatggccttctcaatggcttccatctgagtctgctccagggatttggacctcagtttatccacagccagctggaggaggcccacatcaatcacctttctcagctccacaatctggctggtggaatccttctgcagtatgataccgtaaagcaccggataaatcatcctgctgtcatattcctgactcacaaaggtgccctccgcccgcttgatatgtaccacaccatatgcctctaacaccttgatggcttcccggaccgaatttcttccggcccccattgactccgacaattctgcttctgtagggattttgtcccctgggtttagctctccatttatgatagcattggtaatgttgtctacaatcttattaacaactgactgtcctccgacaggttcctttaaaaaactggtcttttccatgctgaacctcctttgctgcatacacctggcagccctgctttggccgcctatgtgcagtgcttaccgcctccgctcaaccaggcccgtcaggggcctggcgtggcagtccacttatccataagtatacatcatatgttggttcagcgcaatcttctgttccctggctaggaaggaatcaggcacagggacaatgccggtatatatgtaatgcacagcagagccagaagggacataagcagtaacggcaccatctttcggcatatttcctcaaacttaacctttccgatatcagcagcaacatacagattgggtcctaccggcggcgttacctggccaatggacaggttcaataccagaatgacgcccagctgaatcatgttaatatccagggcctttgcgataggcatgatgatgggaaccaggatatagagggcgcttgtattatccataacgcagcctgcgcacaggaatacaatgttgatgataaccagcatgatatacttgttatctgtaagggccagggccatttccgtaagggaagcagcaatcccctgctgagtcagtacccaggagaaaatgcctgcattcatgatgatgagaagaatcatgcccgttgtcttggcagtggaaaacagtgtctccttaagctccgccaggcgcagttccttatagatgaaaattcccactatcaggctgtaaacaacggcaaccgccgctgcctccgtaggtgtaaaaagtcccgaataaatgcctcccagtacaatgaccgggcttaaaagtccccatattgtatccaggaacagcctgccgatttcctttaaggatgccctctgggtttcccccttccatccgttcttcttggacttaatgaacaccataatacagagcatgaagccgaatataagtccgggtataatacctgacaggaacaggtctccaatggattcccctgtaatcatgccatagataatgaatgtaatactgggaggaataaccgttcccagggagcccgatatagcggaaagggcgctggaaaatcctgcgtcatatccctgggccaccatggccggaatcaggatggatcccatggctgcaacggttgctgtgccggatccggagatggccgcaaagaacagggctgccaccactgccacataccccagtccgccgtgaaccggtccgatgatgctgtccgccaggttgataaggcgtttggaaatgcctcccttgtccatgattgcgcctgcaaggacgaaaagcggaatggtaagaagggaaaatttctgtacagtggcctgcatcatggaaggaataacgcccagaggggcgcctgaaaatatcagggtcagtgcgctggacacgcccagcacaatggcaatgggaatgccgaatccaatcatcactgccatggaaccaaatagaatcgctgccgacatattaatttccctcctttgctaatctgatctcatactgtaccatacgggctatggaaaaaaccgctgacaatggaatggcgattccgatggtccactgaggcatctccagaacgcctgtaagcagatgatagtgatactgcctgtaaaccatctgtgctccccatataatccagattccatagttggcagagcataaaaggagcctgcagatacggtaaaccttacgtttagttccggtgaatttatcagtcaggtaattaaagcccatgtgggaatctgtcttaaacacactggccgcggccaggcagcagacccacacaaacatggtggtcaccagttcctgagtaaatgacatgttgaaccatgtaatctttcttgagaacacattcataaatgtgacaaaggtcataacaagcaatgcggctgaacagagatattcctcaaaattctcccagaagtcctttaacaatcctttttccttcataacgcccctcctaattcttataaccgccggtaaacaagtcgattacatcctgtcccacagattttgcataatcatcatagattccggcgcaggccttctggaactccgccttctgctcctctgtcagctctgtgataacggtgcctccgtccttcagcttctggataatgacagcctcgttgtcagccagataatcatttccccagtccagggcttctgccgcgcactcctttaccagctcctggtcctcaggggacagcttgttcatggtcttgcggctcatgacccagatggtggtatcccttaccccgtcccacagggtaacatactgctgtacctctgcaaatttagaagagtcaaaaaccgcgattgggttctcctgcccgtctatggtcttctgctgaagggaggtgtacacctctgagaaatccatggcagtgggatttgccccaaagtaattcctgtacaggtcaatgaaaatattggcgcccggcacacggatattcatgcccttcaggtcctcaggctttgtgatctccttcttgctgttggatatctgtctggaaccggcgttattgatgcccagcatttccatctccaggtcattgcaccagccgtttaccacctcatgcaccttatcgctgtggcagaacgccagcagatcatctgaattagggaacaggaacggcagccagaaggaataaaacttcttatcataattggcaatgtttggcggtgcgcaggagtggatgtcaatgttgccggcctgtaccagctcgatggcctttgtcaggtctccgccggacagtccgcagttggaataaatgctgacttcaatccttccgtcactccgctcctccaccagcttcttaaactcctgggcagtcaggtcgctgatggaccccggactctgtgtatgggtaaaatgaagcactaccttcttatctccggcagaaccgcaggccgtcatggacaaaaccatggccgcagcgcatatgactgccgccgccttttttaaccttttaaacatacttccctctcccttcgttgcgtgcacccggcctctgtgctttcgctgcctgtgcgcgatatgttctaacgcagtacatttcaagtaatacattctaagtaata

SEQ ID NO: 3504 - DNA, 906 bp, Unknown
  gut microbiota DNA sequence
aatcccgtatattacattagtcccttcttaacaagagcgtcctttagtgcagcagcgccgaatctcggactggataatactactttaccatacttttcatgaatatactcctcacagtaggccatggatccctgggcaaagagaatcacatccaccttgtccgcaatggttcccgcgtattcactcataagggccttaaactgttcctggtccaggccgaagccgccatccaccagcgcgtccaccagctctacctgacggttcatctccctggcaacccttaaaatagtgttctttgtgggattcagtgtggtgggaagggttgccataaccccgattctttttccctgccttactgcctcccggcacatctcctcatccacacgcacaatggggattcccgtgtatctggcgatatcctgggcagcgtccgccacctcgcctacggaagaacaaagatttaaaatagcgtccgctccttccgaaacagctgtcatatacatgcccaccagcctggctgccggaggagccgtcacataacctgcgtccctgacctctgccaggatggaaggatcctggtaactggccacctcagtctcccggggaaggacatcccccacttccttttctactaattcaatcaactccggtgttgtgcttgtgtaaaccaatgctactttcatgaattatcctcctgatatacttctattagaaccaacatccaacatcctatgttttatgagataaatatactacatcctacgttggttgtaaattgtgaaaatgcacatgattataacacctcttttatgcagttttacttattaaaaatacaaaaaacatggaaagaacctgcaagtcaggatctcttccatgtttttcattctgcatctctcccgcactccg

SEQ ID NO: 3505 - DNA, 208 bp, Unknown
  gut microbiota DNA sequence
tttcgcagctacaggatgggctgaggaagacggtacttgggtatattacaacagagacggcgagagagcaaccgatcagtggaagaaatccggtaacaactggtactggttagacagcgacggcgaaatggctattgatcagctgattgaagacggcgacaactattattatgtagacatcaacggtgttatggcagctaaccagtgg

SEQ ID NO: 3506 - DNA, 40328 bp, Unknown
  gut microbiota DNA sequence
ttggttagatagcaacggcgagatggctatcgatcagctgattgaagacggcgacaactattattatgtagacatcaacggtgttatggcagctaaccagtgggtagctatcgacaacgaggatgctggacaggacgatgagccggatcattactggtattatttccaggccaacggcaaggcattgactcagggcgataatgacaaggtttccctgaaaacagtcaacggcaaaaagtatgcttttgacgatgaaggcaggatgctgttcggctgggtagatgaagacagcgctgagcgcgttgacgatacggacggcgacggctttaaagaaggcacctactatttcggcggcgaagatgacggcgcaatgaccgttggctggttacagctcgatgttacctatgatgaggccaccaacgacgattataagtataccgctcctgtgtttaatgatgatgaggaccagacacgttggttctacttcaagtccaatggtaagaaaatttatgctgaagacggagaccgcacaaaggataagaccatcaacggcaagaaatatgcctttgacgaatacggcgcaatggtagctgagtggtctctggacgaggaagatctgccaggcaagagccttgcctcctactctgatgctgtagaatccggcgacgttaatgccggaacagccagcgcttccaatatcataaccggtaaggcctttaatgccaagtacagcgaggcatggaaatacttcaacagcgttgacgacggcgcccgcgtaagcaagggctggttcaaggtagttcctgctgaatatctgaacgacgagaaatacaatgatgatgaggactactggtactacgcagacggcagcggcaatctgtacgccggtgagttcaagaccatcaaaggcaagaagtatgcgttccgcaatgacggccgtatgattgacggactgaagttcatctatgaagacaaggatgcccagagcctgactgtatgggctgatgacgatgatccttacagatttgactccgaggacgactttgatgataatgctcctctctatgaggctgccggatactactgctactacttcggcgacggcgatgacggtgccatgaggactaataagagcacagttgagattgatggagaaaacttcaacttctactttgagaaatccggcggcaagaagggtgccggcttaacaggcgagaaggatgataagttctatcagtcaggcaagctgctgaaggctgacagtgatgataagtactctgttgtccagagacagttagtgaagaaaacagatggaaccataaacagcgagcttgaggtagttaccactaaagacagcactaccactgaagtttacaatatgctggatgatgttgatgaattattgtccgtaactaaagatgcaggtattgaaatcttaaccattgacgaccttaattcatctgcttactcaggtaaggctgattctattctgaaggcagcaaacattaacaaggatttggaagacctgagagaggtttacatcttcggtaccaaggacgaaaatggcaactttaaggcatctgagctgaataccaaggattacttcctggtaaatacatccggtaaggtacttgacagcaagggcagacataaagacggcagcgattactactacgctctgaccggcagcggtaagatcgccggtatctatgtagaggattaatccaaactgctgtaagctgatgctgcagattaattagtaatataagggggaagcgttatgactgatttagttgattgtcataacgctttcttttattatccaaattcataatgacaacaggaggactctattttgtttaaaaaaattgcaatattgggaatggccctgatgttaggcctctcttcttccactgctgcctttgcagaccagacagagacatcaaccacaactatggagaactgcggggcttttctttttgaatggaggcccgtggactgcggcgacggtcattattttgccatattagtaggcggaaatactataagtgaaagtgatgtcatcttaaacagaggatatgattacccttatacctttgactatacggttccgcgtccatggggcgaggttccccagttagttaatatagatggtatctggggtatccctgaaaactgggccatccttccggaaggaagccagcccacacttcgcatcacgcttgttacaaataataacatactccccaccaaggaacgatacattgatgtagtcagcctgccgcggaatattaattccagggacctgccggccgaagtacggaaatatttaatcaatgtggacggttctgacgccggtgcctatgacggcaccaccacagccggatgggaagaggaaaacggtttatggcgctaccggaaatcagataatacctatgtctcaaacacatggcttaaactggatgacaaacaatactacatgaacgaacagggcatcatgctggccgacaccattacccccgacggctattatgtaaatgcaaagggcgagaaaacaggttacatacccggctggctccaggacggcgcaagctggaaatatgtgaggaaaaacggatattatgcagccaatcaatggattcaggacacggatggaaagtggtactattttgacatggcggctgtcatgctggcggataccactactcctgatggctattatgtggatgccagcggtgtatgggatggccagcccgcctctgctgtcataaacggtgaaaatcccggtccaggagtggacacagctgctcatactgaagaataatcctgccttttctactgcggcactgataagcggcaaccggggtaccattttggtactcctctgccgcttatcattttatccggaagttagacattttccttctatttgtctatacttttgtgtttatcgtctggttttcatgaataatctatcgaaatttgttcatcaatagacaaataaatgaaactgtatatttatttttgaggaatcctgagctaatatatttgttaaaaaatgaaaggagcaaacttataatggaacccatggagtccccgaatttcttggaacatgctgaacttctggatgaaaatacccctcattatctcaatgcatttcacaaatatctaatccagcataacatgtcccctaacacaatcactgcctatatctatagcgtaaggcacttttttacatactttggacagcttaattccaataatgtcagcctatacaaagtatacctcttagaccattatcagccccagacagtcaacatgcgcatccgcgctctgaactgtttcttaaaattccagggcatcagtgattacagaatacgcgccctccggcttcagcagaaaaaatatacggactacatcataagccaggccgattacgaatacctgaagcgcagactccgcgaggatgaacaatataccttctattttatcatacggttcatcactgctaccggggtccgtgtcagtgaattgatctcttttcaaatacaagatgtcataaacggatataaagacatctattcaaagggaaataagatgagacgcgtttatatccccactgctctgcaggaggatacactccgatggctggaatctgaattcagaaaaaacgggcctctgtttctgagtcacctcaaacggggcatttctgtctctggcatccgctctcagttaaaaacatttgcataccggtatcaccttgaccccaaagtagtatatccccattctttccggcatcgtttcgctaaaaattttatagaaaatggcggagatattgctttcctgtccaatctcctggggcataccagtatcgagactacccgcatctatctgaggcggagcagtacggaacagtcactcattgtaaatcagattgtagactggtaatggaatgaaaggtgtgctcagcatgaaaacaaatatgcaggaaataaatgaaccggcctttcatgcctatctgaaaaaagcccagtcctctcctaatacgattcgcagctgcctggctgcctacagactttatcattccctgtacaatgacctggcagtcaatcatctgctctgctttaaggactatcttatcaggcactacaaagcatccacagtgaataaccggatatacggaatcaaccgttatctggacttccttgaagagatttacggcagccaaatgatccacttccggctgactgttatccgtacccagcaggcagccttcctggacaatatcatttcccaggaagactatgaaacatttaagaaaagacttaaggacagcggaaatatgctgtggtattttgttgtgcggttcctggcctgtacaggagccagggtcagtgaattgattcagattaaagcggagcatctgcatctgggctatattgatctctatacaaagggtggtaaagtccgccgtctgcattttcctgatgctttgtgtcaggaagccctggaatggctgtctgcaaagggccaggtttccggttttttgtttgtcaaccgcagaggaaaccaaattactgcccgcggaatcagcagccagctcaagacactggccatacgctgtaacattccgcctgaaacagtataccctcactccttccgccacagatttgctaaaaattttcttgaaaagtttaatgatatctccctgcttgctgatttaatgggccacgaaagcattgaaacaacccgcatctacctaacaaaatcaacacaggagcagcgggagctgattgacaaaatagttacctggtaatattttgcaccgttattgtgctatagatatacgtaaattccggcggtcccgaccggccgccggatatctcccgcccttacccggaacagaaatattatagacccccacctcttacattttccgaagttatccattactatattatttattggaaaaattaaccacacaagaggaggtattacatcatgacagccacaccaagattaacgtccaatcatgcattggaccagtttcagaaatatctcatgacccataacaaatctccaaataccatctgcgtgtaccgctatgcggtagaacagttctatcatctgtatcctcagctgaccccccgcaaccttcagctttataaggtatatcttttggaacattacaggccccagaccgtgaatctgcgcatacgggcgctgaactgctacatggaatacaggcaggcctccatcacccctgtttccatgataaagatacagcagaaaacatatctggataagattatcagccaggctgattatgaatatctgaagcggtgcctggcggagagcgaagaatatacctactattttattgtgcgcctcataaccgccacaggagtgcgtatcagtgagctgattacctttcagattgaggacgtgcacaccggacacaaggatatctattccaaaggcaataagatgcggcgtgtctatatcccccgcggactggtccgcgagctgcaggaatggctggctgccacacaccggagcaccggccccctgttcctcaaccgctttcactcccccatctccccgtcaggcatacgggcccagttcaaggtatttgcagcccggtacggtctggaccccgaggtggtgtatccccatagcttccggcatcgttttgccaagaattttattgaaaaatgcggggatatatcccttttatccgacctgctgggacatgagagcattgaaaccacccgtatttacctccggcgcagcagcagtgaacaataccgtatagtcaacaaagtagtggactggtagggggcgcgtcatgaaggaacttaagattagcgttatttatggcggcagctgtcctccccaggcagacccctctatgtataatcctgacaattatcaggcaaacttacagtatttccatgatttcctgcaacggcggggctcctctgcaaataccatcgactcctatctcacctctgtccggcattttcacagtctgtaccgtgatgttaccgtggagaatctccagtcttacaaagcatggcttatggaacgctacaaacccagcacagtaaacacgcgtatatatggaatcaaccagtatgtggcggccctccagtccggcagagacacgagtgacaccggaccatatacccctgctgcctccattgattttctggaaccttataaacttccctctgtccggcatcagcaaaagccctttcttaacaatgttatatccaaaagggattatgagcgtctgaaacgtggcctgaaacgggataataatatgttctggtattttgtggtccgctttctgggtgccacgggtgccagggtcagcgagctgatccagattaaggcggagcatatgcagattggctgcatggatttgtattccaagggcggaaaggtgcgccgcatctattttcccgaaaaactctgcggggaaatgctgtcctggctggacagccgtcagatacagaccggttttatattcaccaaccgacggggcaaccccattactcccaggggcataagcagccagctgaaggtgctggcaaaaaaataccggatatgcccggataccgtctacccccactcattccggcaccgttttgccaaaaactttctgactaaattcaatgatatttcgcttctggccgaccttatgggccatgagagcattgagaccacacgaatctatctgacccgttcctccgacgagcagagagagcttattgacagaattgtcacttggtagattgcattttctcaaaaaaaacagtatcataaaagaaactcgcaaaggatggtttatatgtacgaatatacgtggtatcaatggcttacattcttttttatatactgctttttcgggtggatttttgaatccacctatgtttctgcgaaaacaggtcactttgtgaaccgcggttttctgcgccttcccctgcttcccctgtatggaacaggcgccgtgatgatgctgtgggtatccctcccggtcaaggataacctgtttctggtgtacctggcaggtgttatcgccgccaccattctggaatacgtcaccggctggggcatggaaaagctgtttaaaatgaaatactgggattacagcaaccagagattcaacgtgaaggggtatatctgcctcagctcctccattgcctggggttttctgaccattttcctcacagaggtggtgcaccgccccattgagcactatgtcctggggctacctgttatggtgaacattatctttgtgctgattacctccctgctgtttgcagcggatacggctgagtccgtaaaaactgccctggatttggccaaggtgctggatgccatgaccgacatgcgggccgagctggacgatatacaggtacagatggccctgttaaaggcagagaccagcgagcgcgtagcagaggccagagaggaagcggctgccaggctcagccggatgaagtcaggagctgccgtccatgcggctgcattgaaggatgacacggctgaacgcctgaatgaactggtggagaacaccatggagaaaatgagcggattcgtggagggtaccgctgaaaagatgggcgggctggtggaaaacacagccgaaaaggtggcccggacagcggaacggctgtcagagcttacagaggacgcggctgccagggtatccggtacgctggcacagcgggcagagggctcccggcaggcaatacagcgtgatgagcttaacaaaagtgctgtccaggatcgaaaggataaactggccgccctgtcccagcgccttgtatccattaccgaaaaacgccatatgctttccacccatatggacttctaccgaagaggcatactgaagggcaatcccactgcctcctcttcccggttcgctgaagctctgaaggaactgcgcgaaattgcggacaggaagaatccggatgaacatgatgcaaactaatgtcctgttttctttttcgcaaaaaataccctgacagctttacacatctgctttttctgtgtcctgctgccagggtatttatgatttcgttatacttttataattctttcacatccgatgacacattacatcatcttatccaccatggccatcacagccgcgcccagcgcttcagacttggcgtcggcatcctccatggagctgcccttgataccatagtagaacttaatcttaggctctgttccggacggtctcacacagatccatgcgccgtcgtttaaatcatagtacagcacgttggaggaaggaaggcctgtaggctttacttccccggaagccatatcctttatggtatccagcttgtaatccctggcggaaaccaccttataacctcccacctctattggtgtattgttcctcaaagtctccatgatggactgaatcttagccaggccctcaataccggataagccgatagacttaaccgcatccttgtaatagccgtacttctcatacatggcaaccatggcatcccacagggtcattcccttctgcttatagtaagcagctgcctcgcaaagggctgcggtagcggaaatggcgtccttgtcacgggcataggtgccaatcagacatccatagctctcctccataccaaagaggtatgtgccgcggcctgtcttctcattctttaatacctgctgcccaatccacttgaaaccggtgagcacttcaatcagttcacagccgtattcctttgccactgcgtcaatcagattggtggaaacaatggatttgatgacctgcccgtcatccggaatcttgcctgctgcctttttctggctcagcacgtactcacacagaagggaaccggacatgttgcctgtcagcgggatgtactctcctgacccggcgtccttaacatatacgcccagacggtctgcatccggatccgtagccagaaccaggtccgcattcttttccgcggccagcttaaggcccagtgaaaatgcttctgctgcttccggatttggatagcttaccgtagggaagccgccgtccggcagttcctgctcaggcactacatatacatgggtgaatcccagttccttcatcactcttctggccggaatatttcctgtgccgtgaagcggcgtgtacacaatgctgatctggtcctgcatctcatcaatggccttctggttcacaacctgggccttgacctgggcaatgtacttatcgtcgatttccctgccgataacctcatacttgcctgctgctgcggcagatgcctcgtccgtggtctttaccgtggacaggtcctctatggccagcacttcctctgtcacacctttgtcatgaggcggtgtaaactgggcgccgtcctcccagtataccttgtatccgttgtactcaggcgggttatggctggctgtaatattgatgccggctatacatcccagttccctcactgcaaaggacagctcaggtgtgggacgcagggactcgaacttgtatgccttgattccgttggctgccagagtcatggccgcctccatggcaaattccggggacatatggcgggagtcatatgcaatcgccacgcccttatctgctccgccctgctttataatgtagttggcaaggccctgggtggcacgtctcaccacataaatattcatccggttaatgccggcgccgataacacctcgcagtcctgctgttccgaactccaggtccatataaaaacgctctttaatctcattttcgtcaccttcaatggcgcgaagctctgcttttgtgtcctcatcaaaataggggtttgataaccattcctggtatatcttcatgtaatctttcattttatactccctcctgaatgtgatattccccgcatgacctgccggcattctgctgcagcacagccggaaaggccggtccgcagcgtattttctgattaagattatactatatcaaaccagaaaaaggaagtacaaccctctattatttttcgtcagacacagcccttacagtccgctttcaggcgttttaaaaagctgttcctggcctgctgctgttcctccaggccccgcagtttatcagtattccgggccggtatccaggccttgttggcgttgtagtaaaagttaagctgtttccagtatttttcaggataaaggaacaggtagtacaggcatcccctctccttcggctccatgggcagcaccctctcataggaatccagcatcgacagtcccagatccaggttccatccgtgcttttccatgaccttgcgcatgaaacggtacaggtccgatatctgtattccaagatgcatccggttgtactcgatgatggctgtgtaattgcctcccatgagcacatggtgctgatccagatccccatggcacaggtacaggggcttcctgtcctttttgacgggaggctggacctccgctgcctccagggcatcctggtcctcctggtatggccccagcttcaggcatttcccggtattatacggtccggtgccctctgacggcagtttatccgctccgggccacagctcccgtatgccctgtaccgcttccagggcctggtcgtaaaacatctgatagctgccgatgacgcacagctcaaattctgtttttttgcgcttggacctgatataattcctggcccgctgcatttcccggttatggcgctccagctcctcttccagagggccggacaggatggaacccatgttccactcttccttaaactcaatctttcgcagctggctgtgcagcatggccagcctggacagggcctggcgtatttcatatccgtcttttatattgcattcccggtccaaaaaccagtcctttaatatgtatctggtgccgtcgccggtcacggtcatcaggccgccttccctgttccgcaggtaccggtcagccctcaggcttcctctggtatccagccgtcctaagacctcgtcctcaaactccagacgcctggctgtcccacggtattcctttaaaagcctgcagccctggtccgtctcgcagatccaggaaccgcggccttttctcacggctcttacttccatatcatattgttctaaggcttccacgtacttctcgttcatccacaacccctccacactcttatcccatcacatttagtcgaaacgggaagctgccgtttcagctacttctagggtatgtaaagatttggttgtttatgacaggagaaatggcgtaccgttcctatttcccactttgtatataatgtacaaactgtttatgcaattcaggcgctatcatgcccatccgaaaacacccccaaagcggcgaatcatcatatatgatttccttgctccgggggtgtttcatttatctgtttgttattctgtttgttattctgcctgtttttgtctgttaatctatttgcctgcctatatttgcctgcctattcatccttccagtgcagatggtgaagctgacccctcagctccagtttctcaaacccattctgccgcagcgcctcgtacagtacaattgccgcggaattggacaggttcagggaacggatgtcgccccacatgggaatccggatacagtggtcctcattgtccaccagaatctcctccgggatgccggcgctttccctgccgaacatgagatagcagtccggaccgtaggtcacgtcggaatacaccttgcgggctttggtggtggcaaagtacatgttgcctgaggcctggggattgcgctccaggaaatctttataatcgctgtacacagtcacgtccagtttgtcccaatagtccagccctgccctctttaaggccttttcattgagcttaaaccccaaaggctcgatgaggtggagcctggtctgggtggcaacgcaggtccggccgatattgcctgtgttggatggcatttccggttctaatagtacgatattcatcatggtatgccgcgcctttctgttattccctgccgtccagtctttttacgaaccgttccatgcgtcccagagcctctttcaggttatccagggagtaggcgtaggatacccttacgaatccctccccgcagtctccaaacgcagtacccggcaccacagctaccttttcctcttccaggaaccgggtggcaaattcctctgatgtcatcccaaagcggctgatgttggggaaggtgtaaaacgcgcccattggctcaaagcaggtaaggcccatctcctcataagcgtggagaaggaaacgcctgcgctgattgtaggattcccgcatcatggatacatccgggtccccgttcttcatggctgatacagctgcgtactggctggtggtaggggcgcacatgatagcgtactggtgaatctttaacatctgctccagaatgatatggggcgctgcggcatagcccagacgccagcccgtcatggcataggccttggagaagccattgataagcacggtcctctctttcatgcccggaaaggaggcaatggtcacatggcgctttccattgtatgtcagttctgaataaatctcatcggaaatcacaaacaggtctttttccaggacgatttttacaatttcttccagttcttccttttccataatggcgcctgtcgggttgttggggaagggaaggacgagaatcttggtcttgtctgtaatcttctccagaagcttttccggggtcagcttgaactggtccttttcctccagctcaatggttacgggcacaccgtctgccagtgtaacgcagggcatataggatacataactgggctggggaatcagtacctcgtccccctcgtttaacatagccctcagcgcaatgtcgatggcctcacttccgcctaccgttaccagtatctcctggtccgggtcatatgtaacgccgcatctgcgttttaaatattcgcatatctccactttaaggggctttaagccggcattggaggtgtagaaggtacgccccttttccagggagtagataccctcctcgcggatatgccagggcgtctcaaagtcaggctcgcccacgcccagggagatggcgtccttcatctcgcttacaatatcaaaaaatttacggataccggacggcggtatctttacgattttatctgataatgggtttctcatggagtaatcagcatcctttcatcctgcacctgctcacttataatggtgccgtggtctttgtattttttcaatacgaaatgggttgcagtgcttaatacggattccatcggtcccagcttgtcggatacgaactgggcaatctggcgcatggtcctgccctcgatgaacacagtgaaatcataggcgccgctcatgagatacacggcctccacctcgctgtactggtaaatgcgctctgctatcttatcaaagcccattcccctctgcggagtcacctttacctcgattaacgccactactttttcctcactggtgttatcccagttaatcagtgtgtggtatccgcagataatgtgttccttctccatctccgctatctcgttggccaccgctatttcgctttctcccagcagcacggccaggtccttaaggtcgattctgctgtttttctcaatgactgcaagtatcttttccctcataatatatcatcctccatccttccattgtttacataacttattaaattgcacaatttattaatttacataacttccaaaccgtctcatattatctttgtcagttcgtcgggccggggccgctctaaaaaacctgcgccctcctgtccgtggcgtatctgcctggcacttccctccgccacacttccgataacgcccgcaggaattccttcttccctgagccttctcaccagctgtccgcccctgtctgacaccaggacggcgcagtttccgctgtacagccggtagggattcagctcaaataactcacacacctctaccgttacctgcctcacgggcatacacctgaggtccgcatcaattcccgcgttaaatatacctgataaattccaaagggcagctaatacgccgccctctcctgcatactcgtaaacagtgaaggagcagtgctcctccttctgttcacgttttatccattgttccacggaatatggctccgtttcatccagacaccttaagaacataggcgaaaagcgcgttttaaggaaatcccgcttttctgctcctatctttacagtccctgcaaatcccgcataaccggccatcaccaaatcctgacccggtctcataaagccgtcgcgcttctcaaacccgcccggtccctgtcctgccgtacgcattatggtccctccaccggggtgaccgtggggcctccctgggccggggcagggtttgctgcgggcgccggattcgcttccggggctggattcgccgcgggcgccgggttcgcctccggggccggggccggctcaggcgccggctgcgtcacgcccgggcctccctccacgccggttaccggcgctgtctctgccggagctgtatccacaggcgccgtcacatccggcacaaccggcaatgctaccggcagatcaggacctacccggtaaatggccttggatgcattgtaggtgtccttgttaagcagggttctctcctgctccacgccgtccaccgtcactaccttccataatctggatctaagtcctgtgtgggatgactggaccttgacccttgctcccggagccagggtgttgtctacaatgagctgcggctctcccggactggtgcttcccagggtttcagacacgtattccaccttgcggttagccggtctggtctccttgccgtatatggtgaaggtaagcttcctgccagaggtataaccctccacataaataggggtactgtaattgttctttatcttaatatccttataagtgcctgcaatggccgcgtccctggatggtttcacataggtgacaatcatggagtggttctgtctctggacaatctccacctccgcttccagggaagcgttatacagagtggtagccagctggcacacgcctccgccgatgctgtccacgacctggccgttctcataagccgccgctgtcttatacccattggctgtggtaaaaggctgcaggcattcatagcctgacaggacatccccgggcataagaacgtgaccgttaatcttggccgcgcctactgccaggttggtggagcgggctgcgccgctgctgctgaaatcagttgtatatgtgcccagcacatcctgaatggtagccagggcctcactggtaatgaccggctgttcttctgttacctgggctgttacctctatcggctggtccagtccgccttccagggcctcgttaagggctgcctcggttcccgccacgtcaaccacccggccgggtacagagtccgtaatgacaaactgtccgttttctctggttatagatgcattctggggctctgccgtgattccctggcactgtgtatccacaaagttcttcaccttcgcggaatccacctctgtctccagttcaacctccacgggcgctgccgccagatctttttcaatcatgtactgtttaatcaggctgccgccggcatactggctgaccgcctcatcaattacgtctgtgttaatccagtgaaagcccaattcccctgctgtggtggccacatcctgtccatccacgctgagggtcactgactgggccgccaggccgtccacatattcctggaccgctgccttcgcctcctcagccgtcattccggccaggctctggctgcctgcggttatcccggccggcagcacaggcgccgcccaggcaatcactggaaatgccgcaagcagcgccatactgatggccgctgtcaggccggcatttcctatacgattcctcataaattctcctcttccaaactgtaatgcaattaatacataagtgcgcttaaggccataggaacaatcatagccaacactaatacaacaacaatgatggtggaaatgatcttcttggtctttggatctctcatattaagcattgtacattcacctcttttaataatatgcctcagaatctcttctttagtctttctgttccccggatattctgctggtcatccgtccgtactgggagataatattgtcaatcatccgcgacacctcactgcggctcatggcatctatctgcacagttacgtctattctatgacattttaacaaatcgtgcaagtattctttttgtctttttgtggccggctgttctctttttgccttataaatcaagggtttcgccgcaaaagcttccggatgctcctccccatggcgggccatcatcacctgatacagcctatgagccgcctccgcatccgcctgcgcccggtgggccgcagactgagaaacctcataaaaagagcaggcgcaggtcaaattccgttttacatccgcaggcataaacagccggcagatgccaagggtatcaatgccctcccgttcaaaatccagcccgctgttcacagcggcccgtttcaggaaagcgtaatcaaacaatatattatgccccagtaaaggcagattcccgcagaaccggaccacatctccaatcgtatcctcaatcacaggggcgtccttcaccatatcatccgtaatccccgtaagagccgtaatcctctcccccagctgccgcccaggattcaccagggttacaaacctttcctccacccggccgtcctccactctcagggcagcaatctccgttatcttatccagcctggcctcaagtcccgtcgtctccaggtccagggctatgtacgaattcgtcatatcttcctctttccaataaacaccgtaaaaccattatgaaatcatagttaaagacaatccttatatttatgacccattctactacacttatggaggaaatggaactggaaataatagaataataaagaaatcaacatggcacagaacattttcatgaacaggaactgaatattcattgcaaagaaaagcatcctctccttcttcatggcctgaggatacagtccgcaaagcggggcagggcggacagccgatcccgtggctgcctgccctgccccgcttcgcggaggtaccctacgcgcccatcaccctccacaacccaagagccggggcctttactacatatatctcctccccatcctccatctcctgccatccatcctccatctccaaaacaggatatctggcaagcgcgtccttcacatccatgaattcataccctatccggcctatctcgtcctgggacacatattccggatttacggcataggtaatggtaaacctgccctcagaggagctgtgtatcatatgggccggcaccatggcggagccgggaaatgccccattttccatcagttccatggtatagggcgttcccttatagccgtaacggcgtatgagaccgtccacctccgggttctcgccaaaccccttaattcccggcgcaatgacaagtaattccccgccgtcctcaatcatcatacgggtgcggtaaatggccttgtttcccacccaggtggtggaaaactcctccggctccagataagccaccaccttttttgcccggcgttccacctgtgtgatgcagcgtctttttgccagcgcagccgcatgttcatagacctgcctggacgccccggtaaagatgccgtgaagggcggtccttccctcctgctccgacgcaacggtcagtatgtatgccagaggcacatcccggagaaaatgttcctccccgtagtcaaacaccgcccgcaccggcgtgtccgtatttcccataattgtctccagattacagagagcgcccagcatatgggtaccgttaatcatgggccttcctcccagccccaccagtatgttcttggtgtaattggacatgccgatgacctcatggggaaccacctggccgatggacagaatcaggtcaaagcttccatccaccacacagcggttcacctccgcaccgatatccgacgtgtacctgcccccggacaccttgccgcaataggcacccggcaccgtgccgacagggactgtgtcctttctccagtcatggtacagaaaaacctcctccggcacgtcctccccgaaaaaccgtatctgttcctcacggctcatggccctgtgggtccccaccgcaggcatgatgcgcacctttgcctccctgctcagacggtgatacagataggatgtgatgacacccccgtaggaataacagcgtgtgatatccggcggcactaagaggatacgcccggccttcggaagtccctccagcatacaatccatcactgccaccgcctgatgcgaagacagctcccctgactctgtctgtgcgctgaactcagctatatttttcaacatgtatgattccccctgcttcctgtatggtttcctgactgcttcctgtactgcttcatgagtgattccatgaattgtcttccggcctacttcttacgcttttccctgctgtatatgagtaccagcagtacgatgataactccctgcatgatctgacgccctgcctccggaatattgacaatggtcagaaaatcatccagtatggtcatgatgattgcccctgctatggttccgatatatccgccctttcctccggtaatggcggttcctccgataatgacggccgctatggtctttgtattgtagctggtgcccacatccaggaagctggtacccgtgtatcccaccaggaagaaaccggagacagctgctatgaccgcggatatcagatacacggaaaatgtcacccttcctgtgtgtattcccgaaaacctggccgcctgctcgttggtgcccacggaatatatcttcctcccgtagggagtattccgcagaagcacaatggtcacagccgccataacagcccatatgaccacaatgccggacaggatgcctatgaagctctgtccgcagatggccttcagaaggggagatgcattgcccttgggggcgccctttgtgtaaatcagaaacacgccctggataaccgttcccacaccaagcgtcatgataaagggcggtatcttaagccaatggattcccactccgttgataaatcccaccatcacacccatgacaataactgcaaaaagcgcagcgggcagattctcatttcggcccatcatgatctgcgccgcaatcacgttggcaaaggtgatggtattggcgatggataaatcaattcctcctgtcagtatggtcaggttctggccgattgcggcgattcccataaaggaggccagcctcaggattccggccacatgggtgggctttaaatagcccggtgacatgagctgggccgccagcaataataccaccagtataacatagaccataacctgggagctgcctgcatttttcttaataaactgtagattggaagcctgtctgttcttttcttctcccactttctttcaccttacctttctatccttaataataagtccccacaggccctaatgcctcttatgcagcgcgctgagcgacagggctgcaatcagtatcaggccctggcatatgaactggtaaaatgaagaaacgccaaacaggttcagcatattgttgatgatggaaatgatgaacacgcctgctatggtacccagagggtctcccaccgcgcctgtcatggcagttccgcccaccaccgtggcagtgatggcgttcatggcgtaattttttcctatggtggcgtcagccgaattcatctgggcgcttaagaatattccggccacagcgcacaggagcccggccagacagtaggcgcagaattttatctttcccacccgtatgccggtggagtaggccgcattttcactgcctccaatggccctcagggcctttccgtagggagtgctgttggcgagacttctcaccagacagaggatgaggatgaacagaagaaagggtaccgcaccggaatatccccgtgtcaggaacttggcaaacgccttgtgcacactcccccccggattcggcatgagcagtaaagccattccgtcaaatacggctgtggttgctatggttacaatgatgggagccaggcgcccttttgtgaccaggacaccgtttacagccccgcaggccaggcccaccgcagccgctgcccccagggcagggacaaatccccaggcagagtccgggttcatggacatgacgcagaccacattgcacagagccacaattcctcccagggacaagtcaattcctcctgtgagaatgatcagcgtctgccccagggctgccatgagcagcggaaaagaggaacgcagaagattcttgaaattccccagagtaaaaaagtccttattaaatatgcttacaaaaaccatgagagctgccagaaacacgtatatgataaccgtatgcccgtgtttatgccagaagtttcgattcaatctgcccttcaccctttctcaccttccttcctgttctttcccagtcccatgcccagctgcataatccgttcttctgtcagctcttctttttccaggacaccggatatcctgccctcgtacataacaatcacccggctgctcatgccgattacctccagcatgtcgctggagttcatgaccaccgccacgccccgggccgccaggtcatgcatgatttggtagaattcccgttttgcctccacgtcaataccgcgtgttggctcgtcaaagagaataaccctgggctccgtggccagctccttgcccagaaccaccttctgctggtttccccccgacagactggatacaggcaggtccagccctcccattttaatggaaagctttgacgccatggactcgctgaatgcctgttccgcctttttgtctatgaaacatcctttcatgcgctttttcatactggaaatggccaggttgtggcggttggaaagctccagcatcagcccctggttcttccggtcggagggcaccagggcaattccgtttgcaatggcctgccccgcgttctttatgcccacctgctttccattgacaataatagatctcccggacaggggatagagaccgctgacagcattaagcagctctgtctgtccatggccctgcagtccggccacccccagtatctctcctttatgtacctggaagctgacctggttcagcttatggtcagcgtccgccaggtcctttacctcaaatattacctggctgtcatccacttcgcaaacaggcggagggaatacatgattcagggagcgtcccaccatcatccgtattaaatcatcctcatttatctcattcatgttcctggtcccaatatagcatccgtccttgaatacggtaatccggtctcccagctcaaacaattcctccaaacggtgggaaatgaaaataatcgtcttgccatccgcaatcagattgtggataatctgatacagctgctctacctcctttttggccaatgcagaagttggctcgtccagaataatcagttccgggtccctgaccagaatctttaggatttccgccatctgctgttccgccaccggcagactgcccacaggggcatccgggtcaatatggattccatagcggtccatgacgtccagaatgcgctttttaatttcctttcggttgattcttcccagacgggtaaccggttcctggtttaaataaatattttcccagaccgtcatttcccccaccagagtcagctcctggaacaccatggcaatccccagtttctgggactgctcaggattccggattaccacctttttaccatggaaatatatttccccttcatccgcctgatggattcccgccagaatcttaagtatggtactctttccggccccgttttccccggccagcacatgtacttcccccttactgcaggaaaattgtacccggtccagggccgtgatgccggcaaaccgttttgttatattgaccatttttaaaatctcttcagccactgttaacctccttctctctccggaacagacatggtccttatgtgcaaaacaggccgatattcatcggcctgtccatcatccccaaagcgtgctgactacttgtaaagcttctgaagagtcgcgtcatccagctctgtaagaacccagaagctgtccggcatatctgaacggtaatactggtccacattttcttctgtaacggtctcaatatccatgaccacgttccctggaatatcctcgccgtttaaggctttgatgacaacccgcagagcctctgcgctggtgtaggtaggattggaaggtgctatgcaggacagccctttatccttattttcaatccatgcgcggatagcgccgttgttgccttcgcttgtcatgggaaccagatcccggccggctgctataaatgcgtcgattgcgccctgtgtcatggcgccgccctgtgaccacacgccgtcaatttccggataagcggacagcatggattccatggcagccttgccctgggcatagtcccaggaagcgttggctgatcccagaatctcgatgtcgggatactgtttgaacacttcctcagcaccgccccagcgcagggagtcagtagctgttcccgcgataccgttcaggaccacaatcttgccttttccatccagcttatccaccagccactctgctccgatacggccgaattccttctcgtcaatgcctactgtagccacctgctcatctgtctccaccacattgtcgaaggaaaccaccttgatccccgcttcagcagcctcttctaccactggcgcaagggctgttggggaggcagccgtaataacgatggcgtctaccttctttgtaatcagatcctgcatatcgctgatctgcttgttgatatcctcattggaattggtaatgtagtactcgcttaccactccctctgccttcagcttctccgcctcagccacaaactcctgttccatctgggccctccatgagtttccgatggaatagttgcacagggccaccacatatccctcaccgccggctgtctcagaggatacctgggcctctgtggtctcttccgcttcttctttcttttcatcctgggatggggcggctgttgtctctgccgccgctggtgcagccgttgtctccgctgccttttgtgaaccgcaggcgcacaggcccattgccattactgctgccaaacctactgtaaacatttttctcataactcatcttctcctttttttaatagtaacagtcatacgtaagttacctctgatcgtcgaaaaacagccgtctggcgttatccgccatgatcatctgccggtgggactccggtatatggctgcaatgcttttccaccaggttaatcagctgccgcatggtgccatggttcagcatgcccggataatccgacgcccacatcatcttctccggtcccacatggcggtagcatgcctggatgatttccacggaggagggccagggatattcctcgccaaaatacaccggtacggtggatgtgtcgatgaatacattggaacggttctttaccaaatccagcacttccctgtaattggattcaggcatcccttttttaaaacatgcatccgcccccatatggcacagaatgaagctgatattgggatacgctgaggccaggaagcccgcgtcctcaatgtcctctgtgcggaacatgtggatgaataccggctgatggtattgattgcagcagtcccacacaggagacagcccggaatccgaaaggcgggttccgggagcacactggaaggtgctgtccacttccaccttaaagccaaacaggattccctggtcgtagatggacgccagctctctggccgcctcctgtcctttcattatgtcaaccaatgccaccccccgcaaccggtccggataccgttttacgctgtccgcaaagtaccggttatggtacccgtaatagggattaggcataagaaccgccttttcgataccgcaccagtccatataggcgatgagcatttctgctgtgctgcggctctgttcaaaggacggaggaagaaactgcacttcctcatttcctatggcgacccgccccagatccgtggaggccatgggctgtcccctggtaattcccgccacccgctcatatatatgggcgtgaatatcaattacgttcatctaaatccccctacctgtacatttgtgtatattgcactttaacagcactgtttttcggatgccattagtatactatgaccatatttttatgtatatatgatttgattggaatatgttttgatttcattctatcttattgacgctccctgcaaatcgtgatttaatgataacaactgttacattgggatgatatttttatcataaggagggattttatgtatcagattttatcgtatcctataaaaaaagggcagcccacctggcccggcaaccctgcattcagtctggaaccccacacctccattgccggaggcgacacagccaacacctgcaccatccatctttttaaccattacggaacccacctggatggacccatgcatttttacggaaagggcattcccctggaccaggttccctttgggcaatttttctttcataagcccctgctcctggatattccaaaggaacctggcgcaaagctcatgcccgaggatctgattccccaccgtgaggacgtaaaagacgctgatctgcttttaatccgcaccggtttctccaaataccgcagagaaaaaccggatctctatgaaaacaatggtccggctgtcagcagccggctggcccggtaccttcaggataatatgagccatttaaaggccctggccctggattttgtgtcccttgcctcttacagcgacacaaaggatggggatctggcccaccagatcatgcttggcatgtaccacaaccgttatatctgcatcatcgaggatgttaacatggagggacttccgtccggctttctgaaaaacgcagccgccgttccgctgataatagagggcattgacagttcccccgtcaccatgtgggcggagtactgatgcctatgtcacggtttatgctgcggtttaagacatggttcaagacatggtttaagatactatttaagacacgattcaagctgctgtttaggaaacactggtgccttctcatcatctgctccctgtgcgtcatcctggccattaccctgtatgatacctccaaccaggccgcaaactgggaaccggaaccggctgacagctccagcctccatgtgggtttttcccagatagagacagacaatccatggagaacagcccaaatcaacagtttccgcgaagccctgcttcccaatgggatggactttatctaccatgaaccggaggaccactctgttcagtggcagctggaagatatacgcagcctgattcgggagggtgtggactatctggtcattgtgcccgcggacctgtctgccctgactccggtgctccaggacgccaaggacgcgggcattcccgtcatcctcattgaccagtcggccgagaccattgaccagagctactatgtgtctcttatctccgcggactacctgaaggaaggccagatttgcgccggcctgctggcggataaattcggggatcagccctgcaggatcgtggaaatctacggcaccgagagctcacccggagcccaggcgcgctcaaaaggattccatcaggcccttatgaagtatcccaacatggaaatcattgatgtggaatacgggaattttgaccgggtaacagcccaaaaggcaatggaaaacgcacttatcaaggccgccaaccggggacagaccatagacgcggtctttgcccacagcgatgaagacgggctgggggctctccaggccatcaaggtagcagggctgccgccgggtgaaatcgccattgtgtccatcaacggcatccaggacgtgtgcaaggccatcattgccggagaatatctgggcacggtggagagcaacccccgctggggatttattgcggctttcctgatacagcagatggaacgggactgcaagccattccccatggtaatgattccttatcagattattactgctgagaatgcggccgagtatgcgctcaccgcctattaatacaggaaaggaaacgggattcatgaaaaacttcttccgacagctttcattccgcaggaaactgctgatttcctttgtgacgctatcctgtatccctgtgctcctggtgggaattgccgcctatcatctctataccaatttcatcatcaacatgaccgagaaatcctccatcgagaccattgaccttgtctgcgatgacattgacagcctgctcaatgatgcctggaatctctgcgacatgctgaccggcgatatcaagatgcagaaatacctgcgcatggactttgactccgtccgggaccagtattccaacgacctggccggcagcatggagctggcctctatctccacctaccgcaaggatatcttcggagtatatgtgttcggccagaacggcggccgctacaaatccaactactactcattcaaatcagaggaccagagggagactacatggtataaggccattgcgggcagcagggaaaccacctggtttccttcccatgagggcagcttcattgtccgcagctctatcagcgataacttcatcacagtgggacagccggtgatggataaggcttcgggtatggtcaacggcattgtggcagccgacatcaaagaggatgttatcacccagaaaatcaagcacagtctcagcaacggggtcatctgcatcattgatcaggagggaagcatcctgttccgctccaacgcaggcaacgatctccactatcccatcgacatttcccccagcctggtatcccatattctggaatccacaggcactgccgtgggaaaatccatggtagtgcctgacagcgggtacctggtggtaagccgtaccctgatgaattccaactggaggattgccggcatcatagaccggggctttctgacccagagcagcaaggacatcacccatattgtcatgctggtcctgctgattatcgcattctcctccctgtatgtggccatgcttatatcccagtccgtatacaaaccagtacagattctttaccgcatgatggaggaggtggaaaatggagatttctcggtccggtacacgtaccactcctccgatgagttcggacggctgggcaagaatttcaaccagatgctggagcggatccaaaagcttatcagccagatctatgaggagcagaaaaagcttaagaactcggagctgaaggccctccaggcccagatacagccccattttctgtataattccctggattccgtcatgtggcttttgagaatggacaagaatcgggacgcggagaaaatgctcaatgagctgtccacgctgtttaagatttcgctcagcaaggggaatgaaatcatcaccatcgaggaggagctgcgtcacataagcagctacctgtttatcaccaacatgatttacagcaagaaatttgaatacgccattgaatgcgaccctgtgctgtattcctaccgtactcttaagctgctgttgcagcccctggctgaaaatgccattgcgcacgcaatacccatgcctgggcagaaggtctttatacaggtgcgcatttacgaggatgaggacagccttgtactgtccgtgcaggacatcagccggggaatcgaccaggaaacccttgaaaaactgcagcagcagctgggaacagccgcccacccggaccgcagggattccgggtatgggctctacaatgtcaatgagcgcatccatatcctctttggaagcagctacggtctgaccgtcacgtcagagccggattttggcaccgaagtaaccgtaaagattcccaaactgaaaggagatgatatttttgttccaggcaatgctttgtgatgacaatgaaatcatactggaagggttatcccggcagattgactgggagggactgggcatctgcctttccggcactgctgccgacggacaggatgcctggaaccagatgaaggataatccgcctgacatccttatcaccgacatccgtatgccttatatcgacgggctggagctatccaggctggcaaaggacttaaacccaaacatcgtgcttctcatcatcagcgcgtatgatgactttgaatatgccaggacagccatgcatctgcgggccctggattatatactgaaacccattgatctggatgccatgaaccgcatactgacgaatgcggtttcccactgcaggcagttccaccacgacaagcgtctgatggccacacagctgctgcgcaacatggcggtccaggaggcggccggccccgagggcattgtcttaaacgagctggaccttgagcctgattcatggtgctgcttcctgcaggtggagctggacgatcacagcttaagcaagctgtccgacgacatccgttatgcgtcagagcgcaggttttcggccctgagccagattctgtttggtgacagctcttatctgctggaatcccatcagtacagctacagcgtctgcctcacctcccgctccaggatggaactggccgcccggcggaaaattctggtggacacgatacgcaggcagttcccccatgagggaagctactgcgatgtcagcattgcctcgggcagcattgtccagggcatccgcctgctccacaaaagtgtacagacctgccatgaagcaggcaagcttcatttcatcaagggttccaatgcggatatcttttacgaggaggtggagtcttatatctacaatgagccggaggacagccagggatatcccataccggacaccaggcttattacttttatcaaggaacaaaataaggaagggattacaggagagctggagcaattaaaaacatggctctatcagaagggaagcgagagctatctgtatatgacattttccctgggaagcttctatacccatctgatgaaggaattgggggaatcaggaatcaaccttcaggatatatttcagaatcccatcgaagaattcaaaaaagtggcagccggcggtacactggagtccagcatcgaaaacctgaagcagaacctgttcaaaatctgcgacagcatacgcatcaacaaaagccgttacggaaagctcatagaccaggccatcctgtacatccagaaccactatatgtcctcctccttttccattgatgaggtagcgggagccgtatgcttaagcacctcctatttcagcactgtatttaagagcgagacaggaattacatttacggattatctgattaaggtaaggatggaaaaagccaggggactgcttgagaataccagcatgaaaatgtatgaaatctcatccagggcaggatacgaaaatgcggcctatttcagcgccgcattcaaacgatattatggaaaatccccctctgagttccagagccggaagtaggggcggcagacaaaaggaaagaccggccggcggctggcaggaacgcaaaaaaggaggcaagtgctgcatggcggaagggaacggattgaaaaacctacgcctccctgcccggacattcctcccgcagaaagcattcacagcatttcgggcgcctggcaatgcagatggtacggcccagggtaatgatatgtatgttccacagaatccaatggtcctttggcagcaccttcatcagatcatactctatcttctccggctcctcctcttttgtaaggcccagcttcctggaaatacgctttacatgggtatccaccacaatactgggttcattgtatatattcccacgtataacattggctgtcttacgtcccacgcctgcaagggaggtcagctcctctatggttcttggcacctctcctccaaaccgttccaccaggtcccggcagcaggcaatgatattcttagctttcatgtgataaaacccaatggagtggatatcctgttccaattcctttaaatccgccgcggcaaacttctccagggtatcgtatttctggaataaatcagctgtgacgatattcaccctggcgtctgtacactgggcgctcatgataactgcaatcagcagctgccagggtgtctcgtgattcaggtaacagcggtactccgtaccgtattcccggtccaatacatccaggatacgggcaatacgggcggccagttctgcttttgtctccctgaccgctttcggccttccctgagtttttgtgccgccgccagcttttctccctctgccggcctttgtatcccggtcactttttatccctctgccagtttttctgtcagtctcaggttcatttaaaatggtcttctgcagcatatatccagtcctttcatcacaacgtttttgttgcatttacaacattctaaagtttatcacccaattctgactgcccttgcattatacgtcagcgggtccctgtgcctgtaatcaaacagcaccagggttccgtctcccatggcttcaatatgggccatcttactcatctgcctggaatcatacccttcataatccataaggtaatggggagattcctcctccctctgaaagaactgccgggcagcctgtttataagggctttggtcccgggcaaaggatgggcggctttttacattttccctgagatataaatcatacatgagaaggtccctgaaccgttccataacagaggcatccagccctgcatccctacgtctggctatgatactatatagtatctcatatctggctatgcggctgtggctgatgccggtgagattgttttcacggtaatatgcagccatatccagaaacatttcatagggcgaaccgtattctgccgcaagcccggacagagtatggacaaactgtctgctgttataatacacctccgtcatatcctccacgccctttagttccaggatgtccctgtaggacagccaccgggtggacaggacctcatagggcggccgtgaggaatagcagaggccgtaggtcaatgccatttcttccatataagagcccttcagcactttgaggaagcccagctgaagctgctccggctccatggaatatacctggttgaacgaatgacggaaagattccaaattctcattgggcagacctgcgatcaggtccagatgctggtgaacattatgtgcctgattgattgtgccggtgatacggcgtatctcggctatatctgtcttgcggtgtatggccttaagcgtgtccggattagtggactgtacgccaatctccagctggaccagtccaggacgcatctggcccaaaagctcaatctcctcctggtccagcaaatcggcggcaatctcaaagtgaaaattggtgactccgttgtcatgactctggataaaccgccatatggccatggcatgttttttattgcagttaaaggtcctgtccacaaattttacctgaggcactccggcctccaggaaataagccagctcatcaaggaccagttccaggcttctgaaccgtacgctcttatcaatagaggacaggcagtagctgcacgaaaaggggcagccccggctgctctcgtaataaatgatgcggtgctccaaatcctttatatccatatgcttatatggaaatggtatccggctcatatccatggcccggcgtacaccggtatctgccaacgaaccatcggggaggcgaaaggcaagcccgggtatattttccagaccggcctgtccgtccggcaggatttttccactgtctgtcccttttttacacaacttatccacataatatccggccagctgtgcaaatgtttcctctccctctcccttcatgacgcctgttgcctccggcagctccccaagcactttagctgcatcaaaggacacctccggtcctcccagccatatgggcacatccggcagtattttccctaaatccgcgattagatatctgatatattctatattccagatataacaggaaaaggcaatcacatccggttctcttctgaatatatcctgaagaatctggtccagctggtggttgattgtatactcggccagctcaatagacggcttcgcaggatccatggcaccggtcccggttccacggttttccgcccgttcatgcctgccgcctgcttcccccagccccaatacctggtctgcgtaagccttcaggctgtaaattcccagattggaatgtatatatttcgcgttgacagccgtcagcagtatcttcatgggactatacctctagctcgattttatggccggtggactggtactggtagtaacgcactcccgcagcattcagcatacgcttggaagccattaccgccggtgtgtccgcatatttgtcttctctgtatacaatggtcttgattcctgactgtataatggccttggcgcactcattacaggggaacagggtcacatagagcttgcttccctccaggcttccccctctgtaattaagaatagcatttaactcgctgtgtgtggagtagaaatatttggaattgtaggggtcctccttctcattttccttgccccaggggaattcgtcatccgaacaccctttggggaaaccattatatcccatggacaggatcttattgtcctggctgacaatacacgcgcccacctgggtactggggtccttggaacgtcttcccgacaacagggccacccccataaaatattcgtcccatgttatataatccacacgttttccggtcattctttttcctccttttatcctttccgcagccgcctggctgtctctgcacacacgcagcctgcccccgcagtgtccaataaatacagctcctgtctggacattcaggaacggctgcgtggctgcttctggtatcgttgctggtattttatattttcctctgtctgtgaatggattataacattccgggcttatttaatcaataaagttgcataaatcttgggaacgccttggaaatacccctgggaataaccggtgaataactgtttttccggtccttgcctttttccgggataaatgctatattataacaaccagacgatagcggaatataagtaactatcgctcattattctatatctttaacaatatctcaaattatctgaatcgaacgattcatctcattattctgccccttatgtatcgggcaatcatttccacttttatatcacaccaattatttattaaaaggcagaagggctattgtctggtttatcgcaaaacgctataatggggataggttcttatatggcttgccggaacaggaggctgtatggaagcagaatatctgcgtgaacaggaatcagaatcagcaggggccagagggttcagtcagctggaggacaaggtaatgaagacagcggcacagttttttgggaaggatttgcttccctatgcgggtatcaagggccggattgcctgtgtggcacctacagagcatgtccatctggagatgcgcaggctggaagaagactttaattttattatgaaggacgggtcgtggagacatctggaatttgagagcgacagtattcaggagaaggacttaagacggttccgggaatatgaggcttacatagggcttacatatgatgttccggtcacgacaactgtaatatgtacattccgggtaaaaatcctgaaaaaggagctggtcaacggaatgaacgtatacagagtagaggtggttcggctaaaggacagaaatgcggacaaggtctttgaaaagctgcagcggaaaatcagccggggcaagacactggggcgccatgatgtatttcccctgcttctgacccctctgatgtcgggaaagatggagatgagccagaggatttaccagggcatggagtttcttcagtgtaaggaactcaaagcaggggatgaggatcgaaaaagaatgcagtcagtactgtatgcgctggcagtaaaatttttggacagagatgaattagcgatgataaaggagaggatcggaatgactgttttaggcaaaatgctgtttgaggacggtgttgagaaggggattgaaaaaggtatagaaaaaggagtccaacaggggctggggcgcgcaaatgcactgaatgtgaagctggcagatgcaggaagggcggacgacattatccgggcagcatcggataggacttatcaggaacaattgttcaaggagttcggaatttagtagtaaacactttattttgcgaaaacacccgccggcccaaggatctttttaaggggtatattggcctttactgtgcagggcagattttcgtcaggtttgaggagcagcgatataaactgcatctctgacagaaccactatgggtcctccatgggtaaaccaaaacttaatatcaaaaagccttggttgaattaccaaactctgtaaatatgctcaaaagacaactttccgcagggggccgagcgaattatgaagatagaaaaaccaccctctcaactgccaggtatcagggtggttttcctatatagctgcttacatcaacaataacagacttttctttgtgttttcatccgctccagctttgccatcatctattttcaggcactgatttagtcacaatcacatccgtgtcataccccatgagacgcggtatgacaacagttcccgctttcacaggggcggtcagggtatacttttttatctcactcactgcatcgaaaatccggtcccggggtatggggtttgtcagcctcacgctggccaggggaagtatgccgccctttaccaatacagatgtggcaatattcctctggggatccgtcaattcctgctccacatacgccctcccctttgggcaagcggcgccctccacagaacaaatccgtctgcttccgtcttccctctcttcaatctgcgcccttatatcgcatccgttgggacagatgatacatgtatattctctcaacattcagcgctcacctccagccggcccatggacaccagtttatccgccttaaccgtaagttcaatcatttcggccggtatcgctttcttcattttctttgatgcaaccaacacgccgtcctgccttacttcaatgcggcattccttcaaaggactgtttaccctcagggacagcttaaaatccctggtgccgctcactctctggggaacggtatggttaatatggctgtccgttcctatttcgatgggacagggaggcagacatcctttctgcacaaattccgcagcggaatccgccaggctctctgcttccatggaaacaaagtccactaaatcatggacatggagcacatttcccgcagcaaaaattcccgccacatctgtctggaaatgttcatccaccacagcgccctttgtcctgtcatccagggtcacgccagcgtccagtgaaagttcattttcaggaatcagtcccacggaaagtatcagggtatcacacttgtattccttttcagttcccggaacaggtcttaagtgttcatccacacgggacaccgtgacgcctgtcaggcggttgtccccgtggacagccgttaccgtatggctcaggtacagcggtatgccgtaatcattcaggcactgctccacattgcggggcaggccgctgggatatggctggatctcaaacacggcctggacatgggcgccttccagcgtaagcctgcgggccataatcatgccgatgtcgccggatcccaggataaccacttcctttgcgggcattacattgtagaggttaatataagcctgggcaacccctgccgtaaacacaccggccgggcgctcaccggggattcccaaagcgcctctggtacgctccctgcatcccatggtaaggatcacggacttggccctccataccttaagaccccggcgtgttgctgccgtcactgtcctgtcctctgccacctccagaacagttgcgtccgtgatgtaaggaatccctaattcctccacctcatctataaatctctgtgcatattccggcccgcttaatgtggttttaaaacgggtcagtccaaaaccgtcatgaatacactgtctgagtattcctcccagctgtttttcccgttccacaatcaatatattatggattcctttcctatataaccggacagccgcagccagtcccgccggtccgccgcccacaatgagtacgtctatctccatttcctacgcctcctcccgcactctgccgaaaaacatctgtgaatcttttctggcatacctgacttctgttaccttttttcccaattcatcttctatcatctgcgcaatccgcatctggcagtatcctccctggcaccgccccatcatggagcgggtcctgtatttgactcctgccatggtgtcaactcccaatggattatgaatggctgccaggatttcagccctggttaccttttcgcaccggcaaatgacctggccgtaatcaggattctgccgtatcatctgctcctgctcttcttttgtcatctccgcaaaatgaggaattccttttctcacaggattaaaccctggattcggcgtaagtttctccctctcttccataagactgattgcatgacgggcaatgggcactgccgctgtaagcccgggggactcgatgcccaccagattaatggcgcggggcgcaatgtcatcccttatctctatcttaaaatcctgtataaccccgtcctcatccacccatttaggcagaataccggaatagttgcgaatataatcttttttatggatacatggccacaggtccgaagcactcttagccagataatccatattttcctgaggcacgccatagtatgtaaaatctgttaccatctctgcgttgggtccaataatgacattcccgtcagtagtgttggtcacgtggattcccatgtaagtattgctgggaaccggatatacaggcatgggaagaagatatcctgtacgcttgtccagaataatgtaatcccccttggaaccaatcaccttatagccgcggatgcccagcatatcggaaatgttgccgcagcccagtccggcgctgttcacaacccaccgggtgtggaattcaccttttggcgtcgtaagtatataatttccttcgctgtcccgccgtattcctgtcacttcatggtcaaaataatacgctgctccgttggcatgggcattctcagccagggctatggtataattaaaagggtccacaattccgctgttagccgaaaacatggcaaattcccctaccacagccggaaccaattgatggagccgttcttttccaattagctccaggcctgcggcaccattttcctccccctgccggatggtccgtttcagtgtttccatatcctccgccgtattgcctaccagcaccttaccgcagcggatgaatttaaaatccagctcctctgccagttgtcccatgaattgattgccttccacacagagcctggccttcagtgaacctgtgtcataagcaaacccgccatggaccacaccggaattccggccgctggtctcatagcaaacatccaggttcttttccaaaacgcctattttcagacggtatctggacatttccctggcaatggcgctgcccaccacaccgccgccaataatgattacatcatacagttgtttcatgcctctttcctcctaaaggataatcgcaaaattcatcctatgaatatattttatttttaccatatttataaggtgtagtcaagataaaatcgaataaaacgcaactatttataggatgaatatttcctttttttatttcaccacaaaagttacccttatctgaaaacatctgcaaacaggtgcaaaaagtgtgtcccaaaataaaaatagatgaaacggtgccctcttttctgttttttgcgcagaaaaggagctgctgctccagtagattattatttatctactttcgcaacagccccttggcagcaagccattactgttctttagctctcgtccccttcatcccctgcttcccatcccgcatctcacctttataacggttgtcattatacatcaggtggaaatacatagcctgctgcgcctccacaggcttcctgtcccggatagcctcaaatatcctgcgatgggatttaagagtctgttcatactctgtttcctggacagcgccggcaaacacacggacgccgtctgtgattaccggtaccaggttggtcatgaccagattatgggaacaatttgcaatctgggcgtgaaactgcgaatccttgtcagcatagtcctccctttgtatcatctgttcctccaggcccagaagtatgttctccagctggcggatatcctccccggtggcattctgggctgccagagccgcaatgggcggttccagcatcacacgcacctgaatcaggtcctctgtcagttttcttcggtcctctatcatggcaaaccccaggggatcatcggaaacaccgtttttgtctgaaataaaggtgcctgagccctggcgtatggtgacaatatttctggacatgagaattctaagagcttcccgcaccgtgttgcggccaacccccagaagttccaccagctcagcttccgtgggaagcttatctccggccgtatagccgtccctttgtatcatctccaaaagcttctgggatgcaatctcccctaaggtctgtttttccatgtttcctcctgcctgatgcattatacctttacaatcttatatccagccgccttggaaagccggttcataatagcctgtcccaggtggtccttgggaaagctctccgaaaatatgtagtccactcccaaatcatcaaactccctgagcagagcgtaaagattatgggccacggatgcctggctttttcttgcgcctatactgcgtacctcgccgtctgtatagcatcccctggactcgtccgtacagataactcccaccttatagccggcctcaatcttctcccgggagagctcccgcaccttgcaaatcatggcctggagctgtgtctcatccaatccggtttccgggtctgcgcctgtgttccggtctgctccggttttctgctccgctccggttttctgccctgctccggttttctgctccgctccgtttttctgctctgctccggtcacctgctctgctccggttttctgctctgctccggtcacctgctccgctccgctctcccgctctgttccagtccctggctccaccagtgtaaggtcagccttgggggcatagtgcttatacttcattcccggcgcctttggcctgacatccgcagaaagagggcccaggatagccgggtccacgcttatctcccccagcacctccgcaagcatttccatggtaatggcccccggcctcagaacagacggtaccgcggacgaaacatccactatggtggattccaccccgattcccacaggacccccgtctataatcatctcaatcctgccgttcatatcctgccatacatggtcggctgtagtggggcttggccgtcctgatgtattggcgctgggcgcggccacgggcactccggccaaggcaatgagccggtttgccaccgggtcgtccggcatacggattgccacggtatccagaccgccggttgtgccgtagggaaccttttcactcttgggaaatatcatggtcaggggacctggccagaaagcctccatcagcttcctgccagcctccggtatctcctttacaagaggcgccacctcctccacgcaggatacatgggcaatcagaggattatcagagggcctcccttttgcagcataaatttttcttgccgcgtcctcgtccagtgcattgccgcccagaccgtacacggtttctgtgggaaatgccaccaggccccctgaacgcagtatgctggctgcctctttcagttcctcatcctttatatgatttctgtcttctataataattctttttgtttccatgattcatacctcgattgttaaataccgtttgctctatgtccagtctattttagcacccgccacagccaatgtaaagccgggaaatccggcctatcctgcacctgtcacttgaagattacggacatttcgtgtaaacttaagtcatcacaaatgattggaggctttaccaatgagcaacattaacagcgtaatgaaagaattcaaggcatttatcctcaaaggaaacatcatcgacatggccgtgggcgtcattatcggcggcgctttcagcaagattgtgacttctcttgtcaatgacatcctgatgcccttactgggtgccctgaccggaggcgcaagcttcaacacacttaaatatgtc

SEQ ID NO: 3507 - DNA, 145 bp, Unknown
  gut microbiota DNA sequence
aaaacaggccacatcctccacatagagggatatggcgctgtccacctttttattgaggggaatcacatcccccggagcaagctgcagtatatcctgggcatccagggtaaactcgtgaagtatggccctcagctcaacctccgat

SEQ ID NO: 3508 - DNA, 458 bp, Unknown
  gut microbiota DNA sequence
ttttaaaccagatctggggctatgagtatgacggagagacaaggacactggatatgcacatccgtaccctgcgccagaagctgggagaagagggcggaagctgcatcaagaccgtccgtggcgttggctaccgcctggtgcgctcggagacaaaggaggaggatcgatgagaagggctattctgaaaaaatttatactggtacttctggcggcgctgtgtattaacagcgtcatcttttatcttatcagcagtcatatgatcttaaagatggccagagaggatatgacctatactatagaaatgattgaccgtctgctcgattatgaggatgaatcgtatctggctgtccagatcgagcgtatggaggagtttacaggcgcggatgatacgcgggttacactgatccatttagatggcacggttgtatctgacacagatacttctacggaagatctgg

SEQ ID NO: 3509 - DNA, 403 bp, Unknown
  gut microbiota DNA sequence
atcccgtaataattcagccagccacacatatacacttttatctttgctaatgcagggcgtatgctctgaacagaccttcgggaactaagttctttcagctttgacttcattttcttccatgactttccatgaacccggacatatatgccctttccgttctttcccaatgtaaagccaaggaatttaaaagttcggattgcaaacacgctgactacacggcttttctcttggttcactttcaatttcagcggcccttccagatatttcgtgctcgtctccatcagtctcttggcagctctctcgcttttcgccagcagcacgatgtcgtccgcgtaacggacaaatacaactccacgcttctgatactcctggtcaaactcattcagatagatgtttgccagca

SEQ ID NO: 3510 - DNA, 183 bp, Unknown
  gut microbiota DNA sequence
tttaagggcctccagcaggttgttgacctcctgcctgtttaacagctcatggaggtgttcctttaccacctccgacaggtgggtgattaccacggaagtggggtctatcagggtataaccggccagctcggcctgtatcttcctgtccccgcttatccattttgccggtatatggaaagccgg

SEQ ID NO: 3511 - DNA, 346 bp, Unknown
  gut microbiota DNA sequence
ccccggtatatccatatcagagctgcgatccaagtgcaggaagatgaagctggagtatggactcagcgttgtaattatcgactacctgcagctcatgagcggcagcaagaagggcggaggcgataaccgccagcaggagatttccgatatctcccgttccctgaaggctcttgccagggaacttcatgcccctgtcattgccctgtcacagctgtcccgcgcctgtgagaccagacaggaccacaggcccatgctctctgaccttcgtgagtcaggggccattgagcaggatgcggacgtggttatgttcctgtaccgtgatgattattataataaggatacggag

SEQ ID NO: 3512 - DNA, 590 bp, Unknown
  gut microbiota DNA sequence
cttctttcctctgtttaccctgttggaggactcgggttatctgcccaggattgcctataacctggataaaccctttaagagctgccatgcctgcggcaaacaggctttaaccatgtgtatgggattcggatgcaacgcagcgggcattgtgggatgccgtatcattgattcccccagagaacggcttattgccatgataaccaacaactttgtgccatgcaacggaaggtttccgccaccatacaaagggaaacaaaaatgttcctcggcgctgacaatgaagaaacagccgaattaatcctacctatatatggctttgaagattgggctttaaaactgaaggcctatcgtaaaaagaaccatatcacacaacaagagcttgcacagcttatggacgtaaaacatcttactctccgcagttgggaacaaaaacaagcaaagccaccttacaatgtatggcggcttcacaaacacttatttgatgattccatcaagctcacgtgattttaggttatccagtattttatcaatgacggctatcttatcatcggtcgttagattagaactgtttagcctgcgttccaccacct

SEQ ID NO: 3513 - DNA, 305 bp, Unknown
  gut microbiota DNA sequence
gttcagagcgccgatgccataggtatctaaccactccttgcaggctgccttgatatcgtcagttgcgttctcatttgccataacgctctcaaccttagcctttaagccgtctctgattgcgttctgagccagtaacataccataaccgaactcagcattgtcctcaaacagggagttatcccatgcaggaccctgtcccttagcgttcatggtgtatggtgtagaaggtgaggagttgccccagatagaggaacatcctgttgcgtttgcaatgtacattctatcaccaaacagctgggtgatca

SEQ ID NO: 3514 - DNA, 206 bp, Unknown
  gut microbiota DNA sequence
aaccaggagaacacaggtacacggaacccacaggcctgtcattgtacgtatagctgatacaggcaatggctgcctggggatggctgccgtccaaatcataagtaagggcggactgggtgtcggtgaagtcggcgtccctgggtatcaccacgcggccgctccggtccagctccagggatatgctgtcgccggaggtcatgccggca

SEQ ID NO: 3515 - DNA, 176 bp, Unknown
  gut microbiota DNA sequence
caaacggttccgaacccggatacttcactgtacatcataggataaaaaggtcggtaatgcggaggcttatttagcatgcccaaaatcagtaaaacctggaactgaacataaaaagggcccttttcatagaattggggcgggattttaacaaatcccaccccaactattgacaaaga

SEQ ID NO: 3516 - DNA, 145 bp, Unknown
  gut microbiota DNA sequence
tctgacctgcctccaggtgcgtaaggctgtcgcaaatacaaaaattttaatcctgtccaattccgagcagacgccggcatcggtcaacaccagctgctgtgatctggtaagcctgttcacacggtacggcatccgccataaccgt

SEQ ID NO: 3517 - DNA, 226 bp, Unknown
  gut microbiota DNA sequence
ctgaaaccttctctggatacggtatatctggccttcgctctccagccgcatccatccctcgtaggtgccgctgcccttccagggctcgtatttgctgtagacatcattcctggcagcccggcctctctgtttctcaatgccaaagagcattcctctgataaaggtatgaagggtggatttgccggcctcatttttgccgtacactacattcagcccgtccttaaag

SEQ ID NO: 3518 - DNA, 857 bp, Unknown
  gut microbiota DNA sequence
ctatgaaaaaatctaatgtttctttcattgcacaaatgtgaaaaataaaattaaatttgccaagaaactgactggaaaatgtttattctcttaacattaattacaagttagcccgccagactataagtttttgcgttatttttgtatcaattcaccacttattaaaaaccgaagccgtatctttgtagtcgaatttttaaataagatttgaatatgaacgaattaacgggagcggactttaaatccgcaactgctgatgacaacaagaagttgtttatcgaaacctacggctgccagatgaatgtggccgacagtgaggtgatcgcctcggtgatgcaaatggcggggtactccgtagctgaaacgctggaggaggctgatgccgtgtttatgaacacctgttcgatccgcgacaatgcggaacagaagattctgaatcgcctggagtttttccactcgctgaagaaaaagaagaagcgtctcatcgtgggggtactgggctgcatggccgagcgagtgaaggatgatctgataacgaatcatcatgtcgatcttgtggtcggtccggacgcttacttgacgttgcccgatctgattgccgccgtagaagccggcgagaaggcaatcaacgttgaactttccaccaccgaaacctatcgggatgtgattccttcacgtatctgcggcaatcatatctccggattcgtgtctatcatgcgtggctgtaacaatttctgtacctactgtatcgtgccctacacccgtggacgcgagcgcagccgtgacgtggaaagtatcctcaacgaagtgtcggacttggtggcaaaaggctacaaggaagtcacacttttggggca

SEQ ID NO: 3519 - DNA, 1135 bp, Unknown
  gut microbiota DNA sequence
gacctggacattaacctcgtcaatggatctggcgctgaaataaatggttccgttataatccgtaagcaccactgaagccttcatgccgcggatttccagaagctcgttggccgcctgggcaccgatgatggtgggactctccagcccttcggccgagcactcactgatggcaaaggcatccataaacacctctgccttcctgaccgcgtccgcctttgcctggtagtccttcatgttctccctgaaaagcttacgcactctggtgatgtcagctccgcttcttcttaaaaatgccgctgcctcaaatgtcctgacacccgtctgattggtaaagttctgggtgtcgatgacaataccggcatacatggcatccgcctcagcagatttgattttaataccgtctgcaatatactgcaatacctccgccaccatctcacaggtagacgaggcatacggctccacataggaaagcactgcgttatctatgatttcgctgctggtcctgtgatggtctaaaaccacaaccgtcttcaccatctccaaaagagccggttcatccgtaatgctgggccggttcacatccacgataaccagcatggtcccctggtccaccagctcggccgctttcggacccgtgagcagcatatcctcaggatattcagcatttcccgtaaagcgctccatcataggacgcaccgaagaagtcacctcgttgaccacgatattggccttcttgttcatggacatggcaatacggtatatgcccactgccgcgccaaaggaatcaatgtctgccagacggtgtcccataataaggagccggtccttgttctccatcagctccctgagggcatgggcctttaccctggccttcaccctggttgtcttctccatctgctgggccttgccgccataatactgaatcttatcagaatccttgaccactgcctggtcgccgccccgtcccagggccatgtcaatggacgtcctggcatattcataattctggctgtagctgtcaccgttcataccgataccgatacttaaggtcactgccatgtcgttgcctatgttaactgtctttacatcctccaggatggaaaaacgttcttcctgtatcctggccatgtactgc

SEQ ID NO: 3520 - DNA, 184 bp, Unknown
  gut microbiota DNA sequence
ggctaaaatcattgccaaacaggacagggagactcccatgaacagcctgaacggggaaaagatagagaaaattatcacaagtcttttgtcatccccatgtaactacacgcccctcctgcactttgtgatacctgtggattaccagggaatgaaggcattttccgaactgtggatagatcccaag

SEQ ID NO: 3521 - DNA, 205 bp, Unknown
  gut microbiota DNA sequence
atcttccggcactcccattttccgcaggttcttcaccttggttctcggtttcttccattgtttccatatacatattcggattctgtggtatagccacttattgagttcttctattcggttcttcatttccgctatcccgtaataattcagccagccacacatatacacttttatctttgctaatgcagggcgtatgctctgagca

SEQ ID NO: 3522 - DNA, 206 bp, Unknown
  gut microbiota DNA sequence
tgtggtgtggaaacagatgggaagggtaacggcgtcctggtccccataggcggaggaaaggattccgcggtgacgctggagcttctgcgtctggcgggaaggtccgtctgcgcctatattatcaatcccagaggggccaccatacacaccaccgaggtggcgggcctggacgcggcccatgtcataagcgcaaagcgcaccctgga

SEQ ID NO: 3523 - DNA, 145 bp, Unknown
  gut microbiota DNA sequence
gccgcattcatggtcgtggtcatggtgatgatgttcatgttcttcgtgatcatgtccacagccacattcatgatcatggtcgtgatcgtgatgatgatgctctccatgttcatgtacatgtccgcactccgggcatacctcttcc

SEQ ID NO: 3524 - DNA, 222 bp, Unknown
  gut microbiota DNA sequence
aaaaaaccaacaattcttcatcacatttccacaatcaaatcacatcatactccctcaaatcaccgccaacctaccctgcacacatccaaagccgttttcactgtgcagtttttccggtgcgaatccccccgtaaattcatgtttgcttcaggttcgcaccaaactatttgaaacctccttaccgcccgcagccaggtcagaatatcagcggctcttccactt

SEQ ID NO: 3525 - DNA, 205 bp, Unknown
  gut microbiota DNA sequence
agcttatttccggttcctgcagcctgtgaataccggttttaagcggctggtgctaaagggactgaatccgggtaccatgtaccgggtcagcggaatggactatacctcgtacggggatgaactaatgagtgcagggctgattctttcggatggggccagcggcgtacggaccagtccggtgccccagggagattatctgtcccgg

SEQ ID NO: 3526 - DNA, 73771 bp, Unknown
  gut microbiota DNA sequence
agcgtgaagcccccctcaagatgagatatctcatacgcaagtagtaagaccccttgaagacgacgaggtagataggtcagaggtggaagtgtggtaacgcatggagctgactgatactaatcggtcgagggcttgaccaataaggtttagggaaaacaaagttgtaaagtattcggaagatcaacagttcaatatgtggttttgaaggtatgtaccttctaccgtcaatattcctcgatagctcagtcggtagagcaaacggctgttaaccgttgggtcgtaggttcgagtcctactcggggagttttacaaagtttatatttttagcaaggccccatggtcaagcggttaagacatcgccctttcacggcggtaacaggggtccgaatccccttggggtcatttaactaaatatggcgacatagccaagcggtaaggcaaaggtctgcaacacctctatcaccggttcgattccggttgtcgcctctctaaagaatcacagaaatgtggttctttttttgtctgaaatatgcccttttcatattgaggtcaatatggtactatgtataaggaaaaaatttgacaggataaagacatgaattatattgtatttgatctggagtggaaccagagcgcggaggggaaagaatgctctgtggagcatatgccttttgagattattgaaattggagctgtgaagctgaacagtcagatgaagcaggtaagcgaattccatcgtctggtccagccgaaagcatataaagaaatgcattttaaaatatcagaagtgacccatatggatatggaggagctttgtaaaaagggacagccatttccggttgtgatggaggatttcctgaactggtgcggggaagatgaatatgttttctgtacctggggatcgatggatctgacagagcttcagaggaatatgacctatcatggcatggaaataccgtttccaaggcccttattgtattacgatgtacagaaactgtattctctggagtattctgatggaaagagccgtatttccctggaccatgcagtggaacagcttgaattgaaccaggagcgtccgtttcaccgggccttggatgatgcggtgtatacaggccggacccttcgtatgatccatatggaaacatatgggatatacagatccattgattattaccggcttcctgagcgggaaagcagctataagttgaaatttccggagtattccaaatatatttcaggggaatttgactgtaaggaagagatccttaaggataaggaaatatcggatatcatctgtgtaaagtgttcaaggatgctgcggaaaaagatccgctggttttcttatgggcagcggttttattttgcactgagtatttgtccggaacatggttatatgaagggcaagatccgggtgaagaaatcggaacaggatctgtattatgcagtaaagacgatcaaggcagttggagaagaggcgctgcctatgctagtacagaaaagagaagataataaaaagaaaaagaagaattcgtccaaacagtaggctgggcgaattcttctttttaatttactattcttcacgcatgcggtagccaacaccgatctctgtaaaaatgtactgtggttctgccggattttcttccagtttccggcggatgtgggccatgtttacacgcaggatctggttgtcattgtctgcatagggtccccagatctttgtgataatggactcataggtcatgacccgtcctgcattctgggcaagaagacataccagtttgtattcgatctgggttaaatggatctcctgatcttttacttttaccagacggcgttcaaaatccaccaacagatcgcctacctggtatttggagcttccaatatgctggttgcgctgggaatggcgcagagcggtacggatacgtgccagaagctctcctgtaccaaatggcttggtgagatagtcatctgcgcccagatccaaagcagcgatcttgctcttttcaagggttctggcagagataacgataatcggagtgatgctccaggaacggacctgttcaatgagctttaagccgtccatatccggcagacctaaatctaacaggatcacatccggatgctcggaagtgatgtactgtaagccttcctttcctgtattggcgctgatcacccggtagccctgaggctctaaaatatgttcaataaaactgcagatatttttttcgtcttcaataatgatgatatttgctttcgtagtcataattaatactccttccagtcgggtaaggtaaaagtaaacatggcgccatctgcatgatttgcagcctggatcataccgccatgggcattgataatagttttacagatcgaaagcccgattcccattcctttgtggctgtcgccggattcatttgtgtttacgccaccgccatcaaaaagggttgggagccgcttaggatcaataccttttccgtggtctttaatagtaatataaagtactccattttctgtacgtacttttaattcaatgggcttttcgctgccggaatgaaaatgtgcattttctaagagattgttaataacctgctcaatgagcatggcatccatggggaccatgataaaggactcaggaatatgaacctggacagttacgcctggaaaacgcttatggaagcgtctgactgcttctgagatcacttcttccagggattcatctgtttttgtaacactggtaatgcctttgtcatcctggatgcgtgtaacagaaagcaggttttctaccatgtttaaaagccactgggcatcttcttcaatattgtggatcagcttccgcttttcctccggtgacatttcattttcctgctctaagtaggcagcgctggaaccaatgatcgtggtaagaggggtacgcaggtcatgggacatggcgcgcagcagattggcacgcatagtttctttttccgcctgcatcagcatacggtccttttcctggatctgtacgctctgtttggagagcatgatgcagatactgctggtgaaacaggagataaaggtcattcccacgaatgtcagcgggtagccgctcaatgtaaaattcagggtcatatatgggtaagtataagcgtaattgacccagaacacgctgtaaagagaagcgatgataccggcactgtagcatttggtataacgggcgtggagcagaatggccaggatgtagatgatcgatacattaatggcattaccgctgagatgaaagatggcattggcagtcaacgtagctaccgccatacaggcgaccgttataggaagtgtgtgcagtgtattgaaaaaagtaacttttaatagcgcgggcagttttttcaaagagcctttttttaaaatcataatatttacctcagtattaggataattatattataattcattctgcttataagcgcaatgtaagagagtgttaccattttttacggggccgctttactttgtgtgtctgctttttgtaagcaggagtggaacttcttttctgggagagaagctggtcaaaatcggaagaagaataaccgatatcttccaggcgttccagacggcgcttacggcgcaggagcagatcttctttttccttcctgtgagaatggagaaggagaaaaaggatcacgcctacaatgatcagggctgcagagcagatccccactaaaaggaatggaaatgcctttttggaagcggaggaacgtgtctgtgcgctggaacgggcatttgcatcaggaatttccttttgctcgggagtttctgcaggagcagcagtgccggtttctgtctgtgcagcgggtgcctgtgatccggcggatatgttttctgtatttgcctgtgtatgggcagcagagcacagatagacctgtccaatggaatggccctggtattcatataaaatgcgggcaatagcatgatccggcgcattttcatccaattcgtaagaaagggaagcttctgtgtcagagaaatcggcatcttttggaatgatcacaagactgtttttgtctaactccagggaaacattgtcctgggcagtcatgccgccgatggtcatatcgttatcaagtgcctggtaagaggtttcatggtctaccgcttttaacgcctggaaacgatcaaaaccaaagtcaaaaagagccttggtatcggaataatgagtctgatgcccgtttaaaacaacggcgatcagggtcatatcgtttttctctgcacaggtaacaagggtattgcccgcaatggaagtgtaacctgtctttccggcaaaagcccctggatagtacacagatgtgttttttaccagcatacggtggtggttggctacataaccgccttccaaattgcgcttggtaggcggaagcttgtagttgcgtgcgccatcgatctctaagaagtccgggttctggatggctgctctggtgatcagggccatgtcatgggcagtggtgtaatgattttcatcgtttaaaccacttggattggcaaaatggcttcctgtacatccaaggctttctgcagtctggttcataagctctgcaaaggcttctctggagccgcttacgtggcaggcaagggcatttgcactttcgttggcagaagccagcataagggcgtacaggcagtcacggaccgtaaggacatctccttcgtcaatacctgctgtactgctgcctgcttccacattgtaaacatcatcatgggagaaggttacttcttcatctaaactgcagtgctctaatacaataagggcagtgaggatcttcgtaatgctggcaggataataaggctggtcctcatttttagcaaaaagaaccgttccggtctgcgcttccataagaataccgccatctgcttcaatagagacagcagacggccaggaaggcgcggccagaacggttccgggaaccaggataaagatcagattgatactgaggataaaagaaagaattcgtttcattataagcagctcctgttaacggcgtttatttttcagtgtcatgatcaggcagatgccaaaaaggatcagtgacagggcgccgaacagaaaagcaatgcgtccggcagtatccatgaaaaatccttcgggcacgatattgatcagcatatctgtggtcgggtctaagatccacaggtcattggtaaaaaacatgtggtggaacatgatgaaatattttgtaaaattggtggatataatagcagccagtgctgcgattactgcaaaaaacagcccggttcctatacaaagggaagaaggaagcaatgtgcgcaggtctgcttttgagaggatcataaataaaagcataacgacgcagaccaccaggcagatccggcgcagggcaatggcttttaaaaacagtccctgtacatcttccatgtgggcaatttcccgttcattgaaaaactcacgggtttcgccgcccatatgggtggaaacatgaaggtctgcacgttttccctttaaatatgccatcatctggtctgttacatctaagaggtcatccatagtcatagaaggaaggtcgtctagaacctggtatttggtatattctttttcaaagtatcccggagtccagtagaccactgcttctacagaagtgaaaaaaagtatgatcataaggcagaatgcagtaaggataccggcaaatcgttgaaggtgtttcatagtagttgcctccttttggaagataagtatatgttctctcagagagaaatttccttatatacaaagaaaagcccaaccccgcagcttctggtatctgcaaagtcagacctttaagtgcgccttcagggactcgaaccctggacaaatagattaagagtctactgctctaccaactgagctaaaggcgcatgtctatgtgcttttgaatgacacgatagacattataagggattttatagagactgtcaagaggtttcttgaaaaatttttaaaacttttttacattcacatctaactggttaaatggaatttcaatgccggcctggtcaaactgtaacttgatctgttctaagatcctccagcggacggtccagtaatcagaagtgttggtccagcctcttgcaccgaggacaacggagctgtctgctaattcgtctacataaacggtgatgccgtcttctttgatgatcaggggatcattggcatagatctgctttaagatctctttggcttttttcagatcagaggtgtagccgatgccaacagtcaggtccacacggcgttttggctgggctgttacgtttgtgatgaccgcattggaaaggctgccgtttggaatggtgatctttcggttgtctacagtaactaaggttgtgtatacaagaccgatgttctgtactgttccctcggtaccttcacagacaatgtaatcatggataccaaaaggccgcataacaaggatcaggatgccgcctgcgaagtttgcaaggcttccctgaagtgacaggccgatggccaatgttgcagaacctaaaagtgcgataatagaagcggatggaacgccgatcttttctaatgccatgaaaatgacaatagcataggtaatggcatttgccagagaaataaggaatttactcaggctcaggtccattcccatacggtcaaaggtctttttcagaaaatggctgatgtataaggcgatccgagaaccgatgaagataataagggcagcaacaaataaccggtaagccagggacaaaaggccgggagtccaggactttatagactctaaaatggcattgggctttaactgctgtaggtcttcgtggacttcggcagcaactgcctgggtctctgcaagggtaggaagagcgctgctttcctgggcggtgaatagtatcataggtttttcctcctgcttttcggtgtaaactcaggtttcccgcgctgacgcgctccactgcctgctacgcaggcggaaccttcgttaatagcccaagaaaaacaaatgccgctcttggcggcgcttgtttttctcttggactcattatatcatgaattgaaagtgtggacaatgtattgtaaacattcggtgaaattttttaaaaaaaatattaaaaaaattattgacaagaagaggatgatacgctataattctcgttgtgttcaagagaacgcgcctttagctcagttggtagagcagtagactcttaatctatttgtccagggttcgagtccctgaaggcgcattgaaaggtctgattttgcagatattggaggctgcggggtcggacttttttgttgtataaaattagatgaacaggcgcaatgagattgtggctggatcattatttcttatggcagtgtttatggctgggacagggaccgaggcatttatttacctcgcgaaaagctttgcaaagctttaaagcccgtttgtcccagtcttttttgtcgcaggtggctttgcagagttgtcgggtcagtttgggtgggagtttcatggaaatgaggctccttttttgttttgttatttctatatataatatgtaggaaaatgaaatgtggataaaagaagggaaaaagagataatatgtggatgaatgtggataaaatgagataaatggatttaaaatgcaaagatcccggcggattggtatgccgggacctgggtgcatatacggtggtttatttttctttgttttctttaggctctctcatagcgatcagtttgcagataggatttcccatagaggaaaacttttcttcatattctgtcattacatttccggcacacatgaccggatcgtggtgcagatcgaaggtgtgggcggtaatggtccagccagcttcagggattgcttccagggagtaatcaaaaaggcccttattgtcggtcttaaattctaccataccgtcagctgccaggatcttgtcatatacggccataaaatccggggaagtcagacggcgctttgcatggcggtcttttggccatggatcggagaagttaaggtagatcttgtctacttctcccggtgcaaagtagtctgccatgtttttggcatcgatgcacatgaaataaatattgtttaattctaactgggcacgtttttgaagtcctcttaaaagtacgctggaatagcgttcaatgccgatgtagttgatatcagggttctgctgtgccagttccatgataaaacgtccttttcccatacctacttcgatctggatggggttgtcgttgccaaaaacctggttccagctgcctttgtgaagctctggttcctggatcacataggggctggtagcaatagtctcttctgccccgcgtatatgtcttaaacgcatggatattgtcctctttcttaatatggtgaaaagtatcttccgcaactgcggaaaatacggatatatggtgaaaatatatctgctagtaactatatcatatagtgcttagtgattgcaaggtgaaggaaaatttagtatacttacgttagcagataaaagagcagtcgggagtgaaaacaagggtgttgcaagcttgcttgcataagcgcttgctttcgtttccgaatattcgggcagcgcccgaagcttcgtgttttgccaaaaacacgaagactgctctttttaagtttatgaataagtgatttcggggggaaaattacatacaaaggaggaagggcgatgtcaaactttgaacgtactaccagctggcagcagatccagcagggggtgaaggaagcggagcgcctgatcgtcagtaaagattacaatcttgttatggtgaaggccagacagacgttggagtgtatggtccgatgtctggctgagaaggcgtgtcttgtagatggagatctggcagataccatagatcagctgtatgagggacattggatcgacaagacgaccaaggatgattatcataccatccgtattctgggaaataaggcggtccatgaaaacgataatacggcctataatgcaaaccaggcatatcagcttctaaccaaacaggtttatgcattttctcatgattttcaggtggcaaagacctttacagtaccggtaacagatacaagaccggtgcgaaatgccagaacaggtgcaaccactggcagttcaggtgcaggaagtgcatcctatggtcagacaggcggggcaagaccgcgtacaggtaccggtgcagggcagactgcagcttcaagagcacagtcatctgtaagaagtcagacatccccgagatcccagacatcagccagaacctctaacggtacaggaaatggaccgcgctccggtgcagaactgcagggactttccagtcgttccggagcaaacggaagccggagaacggcaggaagcaatagcagcacaggcagcagaaacagaaattcccaaagtaccaaccgctcctacagcggatcttcccgcagcggaaggactcgcagaagaaaacacagaccatcacctgtggcaatggtattaaaattcctgatcccgatccttgtgatcgtagtcctggtagtagcgatccgcactctggtgccgggaaagaagaaagcagatccgacccagccggagaccatgtccacagaaatgacatcagcagagacagaagcaccgactccggaagagacccagccaccggctgatgtatatgtagttacaggaaataaagtaaatgtacgtacagaaccgtctaccaatggccgtattttagtacagttggaaggcggaacagaagttacttatgtaaagcgttataataatgactggactgtgatcaattatgatggtcaggaagcttatgtttccagccagtatatagcaaaacaggaagcagaaacaactgcagagacccaggcagaagcagaaacagccgctgaaggcgagactgcagcaaaccagtagtgtcgctggtttggtcagtgtatggctgagttattgagaactttgtgcaaaacaggagaatgagacccataaaaaggtcccattctccttgtttttgtgcataacgcttaaaaatttcgttaaatttttaatttatgtacaatttcgctctgttaatttttgaaaaaagtagtatgataaaaaaatgcaaaaagcaaattgcattaaaaaaagaacaaagaaagggaggactgtgacatggatacagtgatcaaccggctgtctgatattgagaaagccgccgtttctgtgatggatggtgccagtgagcgaaaaaagcagatggcccgtgaaatggaagagaaaacggcggcttttgatgcacagctggaaaaagaaaaccaggatcgcatttcccagatacgcagcaaaatggaagaggaattacagcaggagttaagacaacaatcagaggatgccaaagctacgatgaagcgcctggaggccacctacgaaaaccggcatgaggaatatgcgcaggctctctttaaaaatatgataaaggagtgagaacatgggaagcctgatcagttacagcggcatttccaccaaggtgaaggctatggagcgtttcaggatccgcccggagcaatttgaggcaatggcagacctgggatctgtgcctgaggcggttcagttcttaaggagtaacccctcttatgaaaaggcattttccaaagcttctgaggatgagcttcaccgcggaaagatcgagcagctgttaaacttaagcaaataccatgattttgcaaagctgtaccggtttgcaaatgtagggcagaggcgttttctggacctttatttcatgcattatgagatcgatatattaaaaacctgtctcagaaatgcagcgggaaacagagaaagtgcccaggatctttcggggtttaaggaattttttgataaacattcggatatggatctggtgcagctgtcccagtgcaggagcatagaagatgtgatccgcgggttaaaaggttctgcttactatgagccattagaaaagcttttagagcagggaaaagcaacgcttccggcctgtgaaacggctatggatatgctttatttcaagactatctggaagataaaggataaatatctttcaaaggcggaggcaaaaatgctggcccagtgctttggcacgaaaatggatatgttgaattttcagtggatctgcagggcgaaaaaatattataacctgtcggaaggtgatatttatgcgctgatcattccgatccagtatcatgttaccaaaaaagagattcagaccatggctcaggcggaaaacatggaacaggtttacggggtgatcaaaaacagctggtacaaatgccagaatatagaagagctgatggatcagggccttggaaatgcggcaaaggagcttacagataagatctatgagcttaccagcaggaaagagccttattcagcagcagtattaaactcttatctttattttaaagaaagagagatcgagcagatcataactaccatcgaaaagatacgttatgggatgacagcaaggacataagggggttaatgtgaagtgatagagaagatgaagttcttaagcattaccggccccaaggcagacattgaccgggtggtggatacctatctttccagatatgagatccatctggaaaatgccctgtcagagttaaagacggtaaaagacttaagaccttatattgagaccaatccatataaggaaaaattgaatattgccagagaactggcagaaaagatcggcggacagctgccagaggtttcagagacggaacttcctacacaggaagaagcagcaaagatggtagatgatctgaacagccggttaaaggaattaaatgataagaaagaagagcttcaggcgcagatccagactttaaagcgctctaaagaccaggtagcaccatttacagagttaaattacagcgtaaaagagatcctgggcttccagttcatcaagttccgctttggccgtatttccagggaatactttgacaagttcaacagctatgtgtacgagaccattgacacggtgatgtttaaatgcctggaagatgcggaatatgtctggatcgtctatttcgtgccggagaagctggcagacaagatcgatgccatttacgcgtccatgcattttgaacggtgtttcctgccggatgagtatgaaggtactccgatggaagcggaacatgtgttagatgacaggatcaaggcgttagaggctgaaaaacaggaagtggaaggaaagatccttcagacactggatgaaaataaaaaagagctggcagcagcccgtaccagactggagcgcttctccgtcaactttgatgtgcgtaaaatggcagcctgcaccaagcatggagatcatactttctacattctctgcggctggatgagcgaaacagacgcaaagaagttccagaaagagatcgagtctgacgcagatactttctgcatcatggaagataaccacaacaacattatgagcactccgcctacgaaaatgaaaaatccgggactgtttaagccatttgaaatgtatgtggagatgtatggtctgccttcttataatgagatcgatcctacgatcctcatcggtatcacctattctattttatttggatttatgtttggtgatgcgggacagggactctgccttctcattggtggatttttactgtataagttcaaaaaaatgcgtctggcaggcattatttcttgctgtggcttcttctctaccatattcggcgtgctgttcggcagtgtgttcggatttgaggatatcattgacgcagtgtggttaagacctcaggaagccatgacagatcttccatttattggaaaattaaacactgtattcgtagttgctattgccatcggtatgggcattatcctgttatgcatgatcttaaatatcatcaacagcgtaaaggagcacaacacagagaaaacatggtttgacaccaacggcgctgcgggactggtattttactttgcactggcaactgtcattgtcctgtatatgagcggaaatgcgcttccggcgactattgtactgactgtattatttattatcccgttactgcttatgttctttaaggaaccgttgtcagcaatggtagagaagaaggcacagaaaatggaaggcggcgtgggaatgttcattactcagggcgtatttgaactgtttgaagtgcttttaagttatttttccaataccctttctttcgtccgtgtaggcgctttcgcagtgagccatgcagccatgatgcaggtggttttaatgcttgcaggcgcagaggccggaagtcctaactgggcggttgttatcgggggaaacctgtttgtatgcggtatggaaggcctgatcgtaggtatccaggtacttcgtctggaatattatgagctgttcagccggttctacagaggaagcggacgggcatttgagccgtatggcaagcattagcagaatgaagagaaaaaggagaaatcaatcatgagtttattagttaaaatgacattaagcgcagcattagtattaagcatcggtgtaccttttggagcatttgcagcaggagaaaagacaaagggacgttataaaacagctcttggcgtaaacgtatttttattcttcggtaccatgatcgcagcagcagctttcatgttttcaggaaatgcatttgcagcagaggaaacagcagcagccgcttctaacagcgcagccggaatgggctatctgtcagcggctcttgcaaccggtctttcctgtttaggcggtggtattgcagtatctgcagcagcaagtgcagcactgggcgctatcagtgaagacagctctattcttggtaaatcccttatcttcgtaggtcttgccgaaggtgtgtgcctgtatggtctgatcatttcctttatgatcttaggtaagctttaatatgaaaatgtatcttatcagcgataacatcgacacctggaccggcatgcgcctggcaggtgttgacggggcggtggtacatgagagggacgaactgaaacgtgagctggataaggttctggccgataaatccattggcattatcctgttaactgaaaagtttggcagggaatttccggagatcatcgacaatgtaaagctggagcggaagctgccgctgatcgtagagatcccggaccgccacggaaccggccgcaagccggactttatcacctcttatgtaaacgaggccattggactgaaactatagaaagcaggtgaagagcttgacaacagaggaaaagctgaagcattttcaggagatctgtatgacagatgcaagggaaaaaagtgcaaaaatactggacgattacgcaaaaactcttgataaggcctatgaggagcatacagaggatgccaggaagcgggcgaaaatgcaggaagaggctgagacggaaaagttagggcgtgagcgcaacaaaaagctttccatcggacagctggacttaagaagagaagtaagccgcagacaggaagaattaaaggataaactgtttgtagaagtgagagataaactggcgaatttcatggaaaccagagagtatctggatctgttggaaaaacagatcggggcagctaaaaaggttgccggtgatgaggccatgatcgtgtatatggatccttcagatgaggataaggcccgcagactggccatgcaccacaatgtaacagtgaagatcagtgaatattcctttgacggcggtatccgcgcagtgatcccgtccaaacatatcctgatcgacagttcctttaagacaaaactggaagaagcgcgccatgaatttaagtttgacttgggaggtaagcagtaaatggctaagacaggtgtgatctacggtatcaacggacctgtagtttctctggccggtgatcccggatttcagatgaacgaaatggtgtacgttggtaaggaaaatctggtaggcgaagtcattgggcttacctcagagaaaacaacgatccaggtgtatgaggagaccagcggtttaaagcctggtgaggtggtaacaggaacaggagcaccggtttctgttacactggcccctggtattttagataacatttttgacggtattgagcgtcctttaagcaagatcgcagagcgcagcggctactatatcagccgtggcatcagcgtagattctctggatacttacaaaaaatggaaaacacatatgacagtaaagaaaggcgaccgggtgcttccgggaactatcatcgcagaagttccggaaaccagagccattgtccataaggtaatggtgccgccggatacagagggctatgtattagacgtagtggaagacggggaatataccattaatgagcctcttcttacgctgcagttacttgacggaacagaaaagaagctgactatgacccagaaatggccgatccgtgtgccgagaccttctgcaaagcgttatcctgcaaccagacctctgatcaccggacagcgtatcctggataccatgttcccactggcaaagggcggtacagcagcgatcccagggggttttggtacaggaaagaccatgacccagcatcagatcgcaaaatggtctgatgcggatgttattatctacatcggctgcggcgagcgtggaaatgagatgacccaggttttggaagagttctcagagctgatcgacccaaagagcggaaatcctttgatggacagaactacattgatcgcaaatacctccaacatgcctgttgcagcccgtgaggcaagtctgtatgccggtgtaacattggcagaatattacagggatatgggatatcatgtagcaatcatggcagactctacttcccgttgggctgaggcgctgcgtgagctttccggccgtctggaagagatgccggcagaggaaggtttcccggcttatctggcatcccgtctgtcttctttctacgagagagcaggcatgatgcgcaatttaaatggtacagaaggttccgttaccattatcggtgcggtttcccctcagggcggtgatttctctgagcctgttacccagaataccaaacgttttgtacgctgcttctggggactggataagaacctttcttatgcaaggcatttcccggcgatccactggctgaccagttattcagagtatgtaaatgacctgtcatcctggtatattgataacgtagacaagaactttgtaagtgacagaaaccgcctgatggcgttattgacccaggaaagcagtttgatggagatcgtaaagctgatcggtgcagatgttctccctgatgaccagaaactggtcttagagatcgcaaaggtcatccgtgtaggtttccttcagcagaatgcattccacaaggatgatacttccgtaccccttaccaagcagtttaagatgatggagaccattttatatctgtacaagaagtcaaaggcactgatcgccatgggaatgcctatgtccgtgttaaaagaggacaagatctttgataagatcatttctattaagtatgatgtgccaaatgaccgtttggacatgtttgatgattacaagaaacagattgacgcgttctatgagcatgtgctggagcgcaacgcataaggaggacttaaaatggcagttgaatatttaggtttaagtgagatcaatggtcctctggtagtgttagagggcgttcagggcgcagcttatgatgaaatcgtggaaatgaccgttggcggcactacaaagaagatcggacgtattattgagatctacggggataaagccattatccaggtgtttgagggaacagacggtatggcccttagaaatacccatacaaggctgacaggacatcctatggagatcgccgtttcagaggaaatgttaggacgtacctttaatggtatcggacagcctattgacggactgggggatattatttctgatatccgcatggacattaacggacagcccttaaacccggtatcccgtgagtatccaagaaactacatccgtaccggaatttctgccattgacggactgactacactgatccgcggtcagaagcttcctattttctcaggaaatggccttcctcatgaccagctggcggcccagatcgtgcagcaggcatcattaggtgataattctgatgaaaagtttgccatcgtttttggcgctatgggcgtaaagcatgatgtggctgatttcttccgccgtacctttgaggaaagcggtgtttccgaacatgtagccatgtttatcaatctggcaaatgacccggtagtagagaggcttatcacgccaaagatcgcattgacactggcagagtatctggcttatgaaaagggaatgcacatcctggtcattttaacagatatgacttcttatgcagaggcattgcgtgaggtttcttcctctaagggcgagattccttcacgaaaaggcttcccaggttatctgtacagtgatctggcatccttatatgaaagagccggtatcgtagcaggaagaaatggatctgttacccagatcccgatcttaactatgccaaatgatgatattacacacccgatcccggacctgaccggttatattacagagggacagatcgttctggaccgtcagttaaacagccagtctgtttatccgccgatcagcgtactcccatctctttcacgactgatgaaggacggtatcggtgaaggatatacgagaaaagatcatcaggatgtggcaaaccagctgttttcctgctatgccaaggtaggtgacgccagggcgctggcatctgttatcggtgaagatgagctgtctgccattgacaagaagtatctggagtttggtaaagcatttgaggagcattttattggccaggcacatcatgagaaccgctccatcatagagactctggagatcggctggaaacttttacgtatgcttccaagagaggaattagaccgtattgataccaaggttctggatcaatactacgaggagtgaggtgagcaggaatggatccaaatacatttcccacaaaaggtaatctgatcgctgcgaaaaactccctgaaactggcaactatgggctacggattaatggataagaagagaaatatcctgatccgtgagcttatggggctgatcgatgaggcaaaggggatacagtctgagatcgacactgtgtttaaggctgcttatgaagcactgcagagcgccaatattgagctgggcatcaattatgtccaggagatcggaatgtccgttcctgtggacgatacggtaaagatcaaggcaagaagtatcatgggaacggaaatccctctggtgcagcatcaggaaaagcctatggagctggcttatgggtttaataatacctcggaggcgttagacattgccagagagcggtttgaacgggtaaaggagctgaccattaagctgtctatggtggaaaactctgcataccggctggcaaattctattaagaagactcagaagcgtgccaatgcgttgaagaacattaccattcctcattatgaagagctgtccaagtctatttccaatgctctggaagagaaggaaagggaagaatttacccgtctgaaagtcattaagaggatgaagaccgggtgatggaaataataaaatggagaagctgacaaagcgcctgaatggattgaaatagggggatactgtatcatgtatacatttaaagatctggtagagatcaccgcgaaattacgggcagaagatggctgtccctgggaccgggaacagacctttgaaagcctgcgaaaatatatgcgggaagaggcagaggaagcagttcaggcagtggataaaaatgacatggaaaacctttgtgaagaactgggagatgtgctctttcaggtgatgttaaacagccagatcgcaaaggaaaaagggctgttttctatagatgatgtgataggtgggatctgcgaaaaaatggtgcgcagacacccctgggtattcggtggtgaaaagataaattcgaccgaagaaggagaggctctctgggcccggataaaaatgcaggaaaaggccaaaaaaccttgacaaattatagtaaaacagatataaatgatagggtatcacagacaagaacgaaaacggtccgaacctgttttttttcggattcggtttaggaggaaaatttgatgaacaagacagagttaatcgcagcagtagctgagaaggcagaaatttctaaaaaggatgcagaaaaggcagttaaggcttttactgatgcagtagcagaagaactggcaaagggcggaaaggttcagttagttggatttggtaactttgaagttagcgaaagaccagcaagagagggaagaaacccaagaaccggcgagaccatgaccatcgctgcttccaagacacctaagttcaaaccaggtaaggctttaaaggacgagatcaacaaataattgattttataagaaaattcggtaatcccctccgtgaacatttgcatcatggaggggattttgtattaaaaggagcgactttatgagattagataaatacctgaaagtatcccgtatcatcaagagaagaaccgtggccaatgaagcctgtgacagcggccgtgttatgcttaatgacaaagtagcaagagccagtgcagaggttaaagtaggtgatgtgatcgaaattgcctttggtaccaaggctgtgaaagtgaaggttacaagcgtacaggatgccatccgcaaggaagatgccaaagagatgtttgagtatctgtaaaaacagaccaataaatagacttcgtcagggaattctgtgaaagttacaggatcctctggcgatttttagttgcctgaaaaaattttttaatctataatacaaatagagtgtcaactcagttgtgtagcaaaactttaaaatgtgtttctgatctgaaaggttgggaatgcattaaaaacatggagaacgatatggcaagaaatacggaacgtgacgagagagaagccacgcgcagaaaagaacagctgatgaaagctggatttaaactgttttcagagaatgggatcgaaaatgtaagtttgcagaaggtggcagatgcagcggatgtaggggttgccactatgtacaaatattaccagacaaaggtaaaactggtagtagccatcagtggaaagatatggggggatatctggaaaagtgtgctggcccagaatggaccggatttctttgaaaactttacagcttatgagtatattgaattttatctggacatgatcatccggttatacagggaaaaaccggaaatgctccggttcagcaataattataagaactttatttaccatgaaggaattgaagaagagcctttaggggaacacctggacgagttggaacctttaagagccatgtatcacaagctttatgaacaggcaaaagtggatcacagtatccgcaccgatctttcagagcaggagcttttcacaactgtagccattgccatgctggcggtggcagagcgctatgcccaggggatcgtatgggccaatgatcataaaacggaccatacccaggagttaaaatatctgaaagaaatgcttcttatgtggtgtaagggaaaaacggaataaaagaagacaggaatagaagatgggatctggtttggggaaatttttccccagcttctttgctatgatctggtaacagagatagcaaaggaggattttcttatgaatacactgtttaccagccgtttaaatgggatctttattttaaacacattgttggagctgcataagccggttacagtgtctgaactggcagggatcattaaccatcgctatgatcatgtaacagctccccggaaaatggtttctgcagatacggtaaagcggtttctcaacgatttttaccagaccacttccgggaccgattactgcagcatccggcttttctgttttaagaaaaaccgttatggcagtctggtcccggatcatgatctggaaaatgtgactttagctacttatgtagctgcctgtctggaacttaatccttcgatgaacgtgcgagacggaaggggattaaaatccaattctgttgtgcactttcacacggcctgagatctgtttgttttcttcccttgcccgccggatcgcgccttcaatgtcgctgatccggcattgttttatggctttttcattaatggaattttgaagacctccgtttgcatcgcccatgatccgttttgccatctggacagaaactttttcaaataaggctctggcttcacgaccgtttccaaagttttcatcatttacacgggttgagaaataagcagtgatcggttctttccagttttccggcagttcgtatccacttatttccgcatgtttcttaaagatctccgccatctccggggctgtataggacggaaaatagaaagtggagttaatacggctcttgataccggggttggcatcgataaattctttcatcttgttgtttttttcatctatatccgttccgccatatccggcaaagatcaccagtttatcttctgcatgttcttctaactcgatcactaactgggcaatggcttctctgctgaaggagtccggttcgcttcggtcaccggtgagagaataagcttcatcaataacgataatgtcattttcctcaaataaagctttggttttcggggcggaatggcctacatacatgccctttaattcagcaccgtttacgcaggtgaactgacttccaggcagaagtttttcttcttccatgatctttcccattaatttagctactgtggttttggcagttccgggagcaccaagcatcatgtgaacgttgtggtaactgctctttttcatgcccatttccttgcgcagacggttgaatttcatgacctggacggtttccatgacctgttcttttacctggtccatgccgatcagatcttctcttaaacagcggatggcagaacgggtctctgtattctgctctgcaggtccccgtttgcctgcaaaacgttccataaactgaaaatccttttttcgcaggataccatgttccttgttccgcagggcatattttaggatcttatctaaaaagtcataggaaaactctttattcattttttcaatatccagtaaaaaatcatggaccggaaatttacgttccagcttgcagccgctgtttgtgaccatttgtttccagatattttcataatagagagagacagagcttgtttttggtatttccagctcttctgcggtaaggcttaatatgatctggttcaggtttttatcctcatttgactcaaaggtgtcaaatccgccaaatcctccaaaagagttaaaggagtcgaagtcattttcttcgtgaaggatcaggacgtagacctgttcattgctgcggaagctatttaaggtatcaatgatcgggtcacacctgaaaaaactgatattctccatagagatacagacaggtttatcctcattttctgcccagtaaggaacaaaggtgtcatttgtcttctggctggccagaaaggagtttccaaaagaggagaagtcattttcctgccagttgtaatagtcatcggcttctttaaatggaataatggggaggcattgccagctgtctgaccactggatgtcaggctctgccccttcttcccactctccacgactgtggatctcattgtagatacctgctaaaaggctgatagccaggtatccttcctccagtttggaagcgtgtaccaggatatactgtggttcctggtgatcctttacaaatttctggatttctttaaactgcactcctccgtcttttatgatctgtgaaagtccttctttacagaactctttggatatatacaaatactctgctttctggggattgactttgcccagattttgtttttgaagttttggtacgatcaggttctttttttcgctcataggatcagctcctttatctgtatctgttttcaggtttttaaggttgttgtcttgttgatcacgcccttactataacggatcaggctatgcaaaattgcctgattttgaaaaaatttattttttcctgtatacttgtgaaagaaaatggaaatgagagtacataaaataagattacataaaaatgcaaaaggagatcacagacatatggcttcccggtacaatcagctgactatgctttatatttttaatatcctgaaactggatgcttctccgaaaaagccctattcggcacctatggtctatcgccgtttaaaggaactggggatcgatctggaccggaagacggtttttaatcatatgaagatccttacagaccagatgctgtctgcggaccaggatgaagagtcttttttcaaacagtatctgtgcagcaggctgtttcgctgccggaaagaggaagggaaagaaaaaagcagggaaaatggcagaaagcccggaaatgaaagcagctaccggatctgtctgccggaagaggaaatcccggaaaacagtgttttatattattatatagaagatgaaatgtcaccggaggagctggaactgcttcaaagtaccgttgctattaaccagtacctttcagcggaaaaaacaagggagatcctggctgatctggagcataaaaagccttttgactgcagggaacagtctctttatacagcatttgcggaccccaggctgaaaaaccaggcaacggatattttcgccagtttgtcagtaatacgggacagtatccgcaagaagaaaaaactccggatcctatatggacggtatgacagaaatctggaactggcgcctaccagtgaagatgcacggaccattgaaccttatgcagtgatgtcaagtaacggttattattatctcatagcaggaaatcccaaatatcccgatggactgaccaatttccgcattgaccgtattttacagatccagatgttggatgagcccagaaaaccattgccgagcgcccttcttccctatttccgggacgcagcccacgaagtttttcaggccagcgagtaccgcaatgaccatccggtcatgtattcagacgaaacagtgcggatccatttaagctgtgatccggtgatcttaaataatctggtggatgattttggctggagcatccagacacgggatataaaagatccggaccatccagactgggtccatgtaactgcaaaagcaagcctgatgggggcagctgttttctgtacccatcactgtaggcactgcaaggtgatcagccctcaaaaactgcgggaaaaagtggttgaaaacctgaaagcagggctggctctttacgaataaaaacttaaaagtcatagaatgtgtttccaccccatatatttaactgatacatactctgaaagctcagagcaggttaatgagtgaatatatgggggtaatttttatggaagaaaaaatatcatccggcaggcttcaccggctggtgctttcggacaggcatacaggttctgtaacaggagtcaatgatgtggtgtcttttgatgaaaatgagatcgtgctggatacggatatgggccttttgactgtcaggggaaaggaacttcatgtaaagcggcttacactggaaaagggggagctggatctggaaggacaggtggacagtttgaattacagttccaatgcagcactgaaacggtcgggagactcatttcttaaccgtctttttaaataatcctggaggtgatttatgagcatgcagatccgttttgaagcctggctgctacttttgagcctgttggtgggctgctggctgatgctggtgtatgacctgctgcgggtattgcggcttatgataaaacacagctcttttgtaatggggatagaagactttttttactggatctatgcggggacagccacttttatgctgctgtatgagctaaatgacggcggagtcaggatgtatgcagttgcgggcgtctttgcggggatgatcctttatgataaaattgtcagtcggtttctctttgcagccttgaaaaaggctggtaaatggtttaaaataaaaagaaatagataaaaaagatggtgactgatacatgagctcctacggaagatcaaaacgcgtaaagcgggaaaaatgggcaaacagaatggctgtactgggcgttacaatggtagttctctgtcttgcagttgctgtaaatgccaagggctcaactttgaagaagtctgacctggattatcagcaaaaggagaagcagctggaagaacaggtacgggaagaagaagaacggacgaaaaagctggaagagtacaaggtatatgtaaagacaaagcagtttgcagaagaagttgcaaaggagaaactgggtctggtaaatccggatgagatccttttaaagcccaatcagtaaaatgagtttcggaataaatgaccggcagaaaatgtcgaaacattttctggaagaaacatgaaaatatgacagatatttccctcctgggtgcgtatactggatgttgcgcagattaggagggatttttgtgttgtcaggcaaaaatgaaaatgggatcaattattatacagccaggaaattaaaagatatggcacagtcattggaacagctggcaaaggcttttgatgaaggtgccggtgagacaatgaaccttacaaaggatgatggtctggctgccatgcagacctgcgctgcactggtctgcggtaactgtggcggatgcagcctttatgcagacagtgaaaaagaagacagttattatctgtattatcttttgcgtatatttgaacagaacgggcggatcggcacagaggatatgccggagctttttaagaaggactgccgcaggaaacgggattacttagagcagttaaaccgcagttttaccagggcttccatgaatttgtcctggaagaaccgctttctggaaagcagggatgtggtcatatcccagttccgtgagctggcagtgatactggaagaattttccaggcagatcgatgaagcaaaaaatattacagaggaatataaaggagcagttaaaaaagcatttcgcaggtatcatatcctggtggacagtatgcttttgctggaatatgaaagcgggcgcagggagatctatcttacagcaaagaccacaaacggacgctgtgttacttccaaggatgcggcagagctgatggagagcgtttttcctgataccacctggcttccggcaaaggacagtcgcagtatcatcacacgcaggtatgaaacagtgcggtttgaagaaaaaggagattattatcttacctggggtgctgcgggagttcccaaacagggagaacgctactcgggcgataattacagtttttgtgagcgaggcagctgccaggtaatgttcagcctgtgtgacggaatgggaagcggggcagtggcaggacaggaaagccggcggatcgtggaacttttagaggcgcttttggaagccggttttgcccccagatccgcttttaaactggtaaatacagtactccttttagcaggaggagaacaacacccggcagcgttggacgcaggctgtattgatctgtatacaggcgccctggaagtattcaaactgggggctgctcctacttttgtaatgggagaagaaggcatacaggtgttaaaagcaggccaggtaccggcaggcgctttagggcaggcagaaccggtccttctttcacagaaattatgggacggggacaggcttattatggtgacggacggtgttttagacgcccttccgggagaagataaggaacaggtcatggggcagtttttagaaagtctggaggaaatgccgcctcaggatatggcagagcggatcctggagtttgccctttcttttgttcccggggcaagggatgatatgacagttcttactgcgcaggtgtggaaacggtaatattgcatatgcaatgcaagaacagcggcaggataaggttgtgtaacaaaaataaagagccccttgcgtatggggaaggatatgggtatagtaagagtggacatgatctttaagggtcatgtaagcaagacagaaacggaaatgaacatactatggagaaactggagtatacagtcaggcagacgatctgccggtatcatatgctgcagcccggtgatcaggtggtcatcgcgctgtccggaggggcagactctgtctgccttttaagtctgcttgcggatatgagagaggaaatggggctgaaactgaggagtcttcatgtccatcacggactgcggggagaagaagcggaccgtgatggggatttttccataaagatcagtgaagctttgggtgtcccctgtcatatgataaaagcagaggtaaaaaaatatgcatcccagacggggatgtcggaagaagaagcaggaaggatcctgcgttataaagccctggaggaagaagcaggggcctgggaaggagaaaacggtcagacagtaaagatcgcagtggctcatcacagcagggatcaggcggagaccatacttttaaacctgtttcggggcagcggtcttggcggtttaaaagggatcccctatgtgagagatcgtattatacgccctatgttggatgtttccaaagaagatatcatcccttatcttgaaaaaaaacggttaaaatgggttaatgattccagtaatgacacagaccattatgccagaaaccgtgtccgttcccacattcttccggcgatcaaagaagaaatcaatccgggagcagaggcaggaatacgccgtgccgggtatctggcaggaatggcagatgtgtatctgaaaaaacaggcagatcagtgggtgcaaaaatatgtaaaagaggaagagcatacctggatgatcccggaaggaccttttaaagaggcagatccggtgatccgcctttacagtgttatggaacttttaaaaacagcagccgggtgtgcaaaggacctgggactggtccatgcagaacaggtagaaaaacttgttgaccttcagaccgggcggaaggtgtctcttccttatggactggaagcccgaaaagtatacggcgggatcagcctccaggcagtaaaaaaggagcctttggaggaaagaataaaaaatccccttccggagctttcttttgaggttttttcttatgaaaaagcaatggaatttcccaaaaagacgtatacgaaatggttcgactgtgataaaataaagggtacgcccgttgtcagaaccaggcagaccggggattatatcaccctggaaaatggcagtcgcaaaccattaagacgctttatgatcgacgaaaaaatacctgcagataaaagggatgaaatagccctgttagcagatggggaccatatcatgtggatcataggcaggcggatcagcagttattataaaataggccctgatacacggcgtgtattacaggcgaaagtttcccaaagtacattatcatagaaaacggaggataaatcatggcagacaaaattcgtgtattattaacagaagaagaagtagataagcggatcaatgaagtagcagagcagatcaacaaagattatgcaggcaagagcgttcacctgatctgtattttaaagggtggtgtattttttacctgtgaactggcaaagagactgaacatgccggtttccatggactttatgtccgtatccagttacggcgcaggcactgtgtccagcggtgtggtaaggatcatcaaggacttagatgaaccgttagagggaaagaatgtcctgatcgtagaagatatcatcgattccggccgtaccctggcttacctgatcgaagtattaaagcagagaggaccgaaggatatccatctttgtacccttcttgacaagccggagcgccgtgtaaagaagcaggtaaaagtagattacacatgctttaccattccggatgagtttgtagtaggttatggactggattatgaccagaaataccgcaaccttccttatatcggagtagtagagcaggatcaggaagagacacaggaataattccgggtcctaaaattaaggaggcaattcgttgaaacagcaacagacattcagaggttttatgtttattatcctgatgctgatccttcttatgcttgcgctgcgttttccttatgcaaggcaggcacagacggtaacagcccaggaatttgagcagatcttgggaagcggaaacgtggcagaggcagtgatcagcccaaatccccagacaccaagcgggtatgtgacagttacactggcaaatggccagacagtccgccagaacgtatctgacgtaaaagatgcagagcagcttttaaaggacaatagcattgattattccatggaggatgtacctcaggagaatacccttcttactgtggtaatgcctttcatgctttccatcgtagtagtggtagtgatcgttaccatgatgaaccgtggagcagcaggcggcggttccaatgccagaatgatgaactttggcagaagccgtgcaaaactcagccgtgacagcaaggtgaatttcaccaatgtagctggtctggaagaggaaaaagaggagctggaagaagtagtggatttcttaaaaaatcctcagaaatacaccagcgtaggtgcacgtatccctaagggaatgcttttagtaggccctccaggaaccggtaagacccttcttgcaaaggcagtagccggagaagcgggagttccatttttttccatttccggttctgattttgtagaaatgttcgtaggtgtgggcgcttcccgtgtccgcgacctgtttgaagaagcaaagaaaaatgcaccatgtatcgttttcattgatgagatcgatgcagtggcccgtcgcagaggtaccggaatgggcggcggacatgatgagagagagcagacattaaaccagttactggttgagatggatggtttcggtgtcaatgaaggcattatcgttatggctgcgactaaccgtgtggatatccttgatccggcgatccttcgtccgggacgttttgaccgtaaggtggctgtaggccgcccggatgtaaagggaagagaagagatcttaaaggtacattccaaagaaaagcctttaagtgaagacgtagaccttcgcagagtagcccagacaacagccggatttacaggtgcagatctggaaaacctgatgaatgaggcagcaatcatttccgcaagagacaaccgccgttttatccgccaggcagatattgacaaggcatttgtaaaggttggcatcggtgctgagaagaagagccgtgtgatctctgagaaagacaagaagatcactgcttaccatgaggcaggccatgcgatcctgttccatgtgcttcctgatgtaggtcctgtgcataccgtttccattattcctaccggtgttggtgcagctggttataccatgccgcttccggaaaaggatgaaatgtttaacacaaagggtaagatgcttcagaacattatggtagacctgggcggacgtattgcagaggagatcatctttaaagatgtgaccaccggtgcttcccaggatatcaagcaggcaagcaagcttgcaagagccatggtcacccagtatggtatgtctgatcgtgtgggaatgatccagtatggcagtgatgaggacgaagtatttatcggccgtgatctggcacacaccaagtcctacggaaacgagatcgcagatgtgatcgacgaagaagtaaagcggatcgtagatgaatgctacaccaaggcgaaaaatatcattctggaacatgaagatgtacttcattcctgtgcagcccttctcatcgaaaaagagaagatcggacaggaagaattcgaggctttgtttaaaaatcacgaacctgtcatgcacaatgatggtgagatgtaaaaatacagcaaaaagcagctgttaaaattgacagcgaaaaaccgtgaaaaaaatatatctttgtgcacacttttgtggggagttatgctattataatagatgtaaccccccaatacattatatagtttttgctacaccccataagaaacgaaataccttctcctgaaaagcctggctaccccgccaggcttttcgcatatctggatatgtggaaaaaaatggaaaataaagagaagaaagttaataaccggtataccggtgtgttgcatatttgaaaaaattgatttaaaataattatggatttaataataaatataaaagaggaaaaacctgtgaaaaataatattcagataaacagggatgccctgttttcagcagaaactcaggattaccgtatgcctgcagagccggatattcatgataaagttgtggtgagaatgcgcacggcaaaggatgatgtggatcatgtttattatatagagggaaagaaagagacagagatgaaaaaaactgtctcagatactctttttgattattatgagcacacaatgacagcaggagaggaacagatcctgtatcattttaaaatagtaaagggaacagaagtctgtcagtataaccgtctgggagtttctgatcaggacacggaccagtttgattttaagatcacacctggttttcacactccggactgggcaaaaggtgccgtgatgtaccagatctttgtagaccgcttctgcaatggagatccgaccaatgatgtacagtcctgtgagtatgtctatattggcaaaccggtttaccaggtaaaagactggagcagaaatccttctactatggacgtaggctgtttttacggcggcgaccttcagggcgtgtgggacaaactggactatatcaagagcctgggcgtagaagttatttatttaaacccggtattcgtatccccgtccaaccataaatacgactgccaggattatgaacatattgatcctcattttggaaagatcgtaaaagacggcggttccatggtggatcagaatgctgcggataacacaaaagcagagcggtatgtagtgcgctccgcagatcgtgaaaacctggaagccagtgatgccttttttgcggaattcgtaaaagaagtacacaaccgcggcatgaaggtgatcttagacggtgtgttcaatcactgcggatcctttaataaatggctggatgcagagcagatctatgagcgttccggtgattatgagccaggggcctatatttccaaggacagcccttatcacagctttttccattttcatgacaacagtgataaagcatggccttacaaccgcacctatgacggatggtgggggcatgataccctgccaaagctgaattatgaaggctctgataaattagttgagtatattttaaatgtggcaaaaaaatgggtgtctccgccttacagcgtagatggctggcgtctggatgtagcggcagatctgggacatacagcagaatataatcacgctttctggaaaaaattcagaaaggcggtaaaagaggcaaatccccaggcactgatccttgcagagcattacggcgacccgtccggctggcttcagggagatgagtgggactctattatgaactatgatgcctttatggagccggtcacatggttcctgacaggtatggaaaagcacagtgacagctataatggcggtctttacggaaatggacagtctttctttgatgccatggcttatcatatgagccggatgcagaccaacacggtgtttacagccatgaaccagctgtcaaatcacgaccactcccgcttccttacaaggaccaaccaggtagtaggccgtatcggaagtatgggaccggaacgtgcttctgaaaatgtaaagaaatgtgttatgagagaggcggtcatgattcagatgacctggccgggtgctcctacactgtattacggcgatgaggccggtgtgtgcggctggaccgatccggacagcagaagaacttatccatggggaagagaagacctggaattaatggaattccaccgttatatggccggtatccacaaacgtcttcctgcactgcgaaaaggcgctgtaaagccattatttgcggcaaaccagcagattgcctatggccgtatgtgggacagataccagacagtgacagttatttccaatttgccacaaccgtctgcgatagaaattccggtatggcagttaggcatcacagatgaagatattatgggacgtcctattataacaacagaggacggctacaatgcaggaattttattctaccatgtaaaagacggtattttgaaagtaagaatgcctgcatacagcggtgcggtctttgcttcccatccggaagatttttatccggtgcttccatctcgttttgtagaagagggagaagaagaggcaagggaaaaagagcagcttgagaaagctgcggaagcataaaaagatataaaagagcatataaaagaagcagactccggttttgctgggagtctgcttcttttgcagttattgtggcaagacgaaacgaaatttgccacgctgtttacaaaaaaagaacagaaccaatcaggttctgttccaaaagctgccgtagaccggaatcgaaccggtacgggtatcactacccacgggattttaagtcccgggcgtctgccagttccgccactacggcatattcttttttcatacatacctattgctgaaatcaggcgcatacgtgcaagcactgtcgctcttagcaggtatgtaaatgggcgaaggtggattcgaaccaccgaaggcagtgccagcagatttacagtctgtcccctttggccactcgggaattcgcccatggctttttcaagcagtaatgatgataccatagaaaaaaggaaaaatcaatactttttttgaaaaaaatttacggaattctttgactgataatgtttatcatggacgaatggccctgcatatggtataattcataagataggcgtattccattcatttttgggtacgattggaggaagactatggatgagaaaaggaaggtgcgggggaacttccgcatttatcttcagtggcccatttttttatcggtcctgatggtcctgctgacagctgctgtgggggcagtttcattaagagcaggcattatagtttcattttttactcttatctatattggaatagcgttatggatctacttttccagaagaaagggcattcttgcgggactgatcgcattttcacaggtctacgacaagagcaaaagtaaatttctggaagaaatgctggtgccttactgtgtggcggatatagcaggtcgtattttgtggatgaaccaggaaatggaagccattcttggggatgataaagcaaccatcaaaaacattacccagatgtttccggatgtcacaaaggaaatgcttgccaccggtggagaaactgtaagtatccacagctcttttaaagataagaagtaccgtgtggacatgaaagagatccatacagaagaggctcaggcagcggcagctgactgtggactggatgagggaaattccctggtaacagccatttatctgatcgatgagactcagatgctgttatataagcagcagatcaatgaccagaaactggtagccggtcttatttatctggacaattatgatgaggcgctggaaagcgttgaggaagtacgccgttctcttttaacagctttgattgatcgaaagatcagcaagtatatttcttccatgaacggtattgtaaaaagtattgagaaggataaatatttctttgtgatcaagcagcagtatgttgcaaagatgcaggatgagcgtttttccattctggaagatgtaaaaacagtcaatatcggtaatgacatggcagtcactttaagtatcggtattggtatgaacggtgaaagttatgcacagaattatgattatgcaagaacttccatcgatatggcacttggccgcggcggtgaccaggcagttgtaaaggactccgataagatcctttattacggcggaaaagcccagcagatggaaaagaccacccgtgtaaaggcccgtgtgaaggcacatgctttaaaagagctgatggataataaagaccgtctgttgatcatgggacacaggatggcagatattgatgctttcggtgcggcagttggtatttaccgtattgccatgtccatgaataaaaaggcaaatatcgtactcaatgatgtaacttcttctgtacgtcctatgatggaacgtttccagaacaatccggagtacccggatgatatgttcttaaacggcgccaaggctgcggagctggtggatgcaggtactatgctggtggttgtggacgtaaaccgcccaagtattaccgatgaaccgagcctgctgcgtctgatccggaccattgtggttctggaccatcaccgtaccagcagcgaagtgatcgacaatgcggttctttcttatgtagagccatatgcttcttctgcctgtgaaatggttgcggaagtattgcagtatattgcagacggcattaaagtaaggccctgtgaggcagatgccatgtatgcaggtatcgtgatcgatacccagaattttaccaaccagacaggcgtgcgtacctttgaggcggcagcattccttagaagaagcggcgcggatgtaacaagagtgcgcaagctgttccgtgaaaatatggtagattatcaggcgaaggcagaggcagtaagggctgcagaggtttatatggacgcatttgctatcagcgtctgcccggcagaagggttagacagcccgacgatcatcggtgcccaggcggctaatgagcttcttgagatcaagggcattaaggcttctgtggtacttactgattacaataataccatttatttcagtgcccggtctattgatgaggtcaatgttcaggttatgatggaaaaactgggtggcggcggtcacaggactattgcaggtgcccagatgcagggagttaccattgaagaagccaaggagcgcctgaaagcggttatccgtcagatgatggatgaaggtgatgtgtcttaacagacagtatcgaagatattcagagatataagatatagagatattcagatgatatagaaaggaagttttgtaaaatggaaatcgtattattagaagatgtaaaggcattaggtaaaaaaggacaggttgtaaaggtaaatgacggttacgcacgcaacttcatccttccaaagaaattaggtgtagaagcaacctccaagaacttaaatgacttaaagcttcagaaagcaaatgacgcaaagatcgcagctgagcagctggcagcagctaaggaactggctgagaagttaaacaatgcttctgtgactgtttctatcaaggctggcgaaggcggaagagctttcggtgctgtttcttctaaggagattgagaaggcagctaaggatcagttaggtctggagatcgacaagaagaagatcatattaaacacaccgatcaaggccatcggcagctttgaagtatctgtaaagcttcacaaagaagtaactgcaaaactggcagttaaggtagtagaagcataactgttattgttatttcaggacagaggagataagtttatggaagagaccctgatcaagcgggtgcttcctcacagtatagaggcggaacagtctgttataggttctatgttaatggacagggaagcggtaatcgctgcatcggagatcatcacgggcagcgatttttatcagcagcagtacgggatcatgtttgatgccatggtggaactgttcaatgaaggaaagccggtagacctggtcacacttcaggaccgtttaaaggagaaggatgttccgccggaagtcagcagcctggattttgtccgggatatcattaccattgtgcctacatcagccaatgttaaatcctatgctacgattgtcagtgagaaagcagttctgcgccggcttataaagacaacagaagagatcgcaaatacctgttatgcaggaaaagagccactggaaaatattctggcggatacggaaaaatctatttttgacctgctccagaacaagggcggacaggaatttgtacccatcaagcaggttgccatcaatgttctggaaaagatcgaggatgcatataaaaaccagggaacggttaccggtatcccttccggatttattgatctggattataaactgtccggtttccagccttccgattttatcctgatcgcagcccgtccttctatgggtaaaacggcttttgtcttaaatgtagttgactatgtttctgtgcgtaagaacctgccctgtatggtattcagtctggaaatgtcaaaggaacagctggtaaaccgtatgctttccatggagtccaatgtagactcccagaagctgcgtacaggtacgctgacagactctgactgggatgcggttgtggaaggtatcggcattatcggtaattccaagctgatcattgatgatacaccgggtatttccatttctgagctgcgttccaagtgcaggaaaatgaagctggaatatggcttaagtattgttatcattgactacttacagttgatgagcggaagccgcaaagggggaaatgacaaccgtcagcaggaaatttccgatatttcccgttctttaaaggcactggcaagagaacttcatgccccggtcattgccctgtcccagctgtcccgtgcctgtgagacacgtacagaccacagacctatgctttccgaccttcgagagtccggagccatcgagcaggatgcggacgttgttatgttcttatatcgtgatgattattataataaagatacggaacatccaaatgaggccgaagttattatcgccaaacagcgaaacggccctatcggtactgtaaacctgatctggaaaccggagtacaccaagtttgtaaatgcagtgcgtcctcagggtggaaatcaggaaggataatgtatatgatctggcacttgtatcagttgatgcaggtgccatttatatttttagtcataatagtcattctcaacgcatacattgataataaacagcggcaaaagggctgcagttaatcagaatgatacgtgttgtgaaggagagaatggctatggatgaagtacattatcttatatcggatgcatccaggaaggtggatgtggaagcccatgtattaaggtactgggaggaggagttagaacttgcgatcccacggaatgaaatgggacacaggtattatacggattttcatatccggctgtttaagcaggttaaaaatctgaaggaaaaagggtatcagttaaaggcgatcaaacatgctttagaacagatgaaaaaggacggaaagctggaaggcgaactgacagatgagattttagagcaggacatggatgctgctttaaaagaacttaaggaagaagagaaagaggaaaatacagctatggtaagcacatctgcagatggaagtccgctgcctgtaagcgcagaagagaaaatggcccagtttcagcagatgatgaacctgatcattggacgggcccttgaggtaaacaatgaaaaactgagtcaggatatcagctgcctggtaaaacagcggctggcaggtgaattggaacttcttcttcaggagtccggccagaaggaagaggaacgttttcgtctcctggatgaaaccatccgttccttccagaaagcaggacaggaggaagctgctgcaacaaaagtgccattttttaaaagaaaacgctttggacggggggctaagaagctttttcacagggaaaagagaagttaaagaaaataagaaaaataataaaaacaaagaaaaagaaggacaagccagggagcgctgttatggaagctgtttctggtttgtccttttttgcgattttcttaagactgtgaaaaatatcgaaaaatagtaggatatgtgctataatctgataagcgcaagcaggcagtagagcgcgcaagcgcgtggtcctgagtgaaactagtggaagcgaaatcttcagggattggatttacagaagcaacaaacaacaagcgaggatacatttcatgaatgaaaaatatacatattatctgcgatatgcctgcatatccagtgcgctggcggcagcgttggcgttaggaggctgttcttcaggggaaagaggagttgcaactcagaatgaggctgtagctgcaaatgcccaggacggacaggcagcagtttcagatggaacagatgagaccatagcacctttaggaatggatgggcagatccttcctggactggatgatgtagaattgccggaagatgcacaggcagcgcctcagtatttaagagaaggtgtacgccatgagatcgtaaagaagttacagcagcgattaatggacttgggctttatggataacgatgaacctactgactattttggtcaggtcactcttacagcagtgaaacatttccagagacagaatgaactgcctcaggatggtattgtaggtgataccacctggaatgaactgatggcagatgatgccaaacattacgcagtatcaaagggaacccagggggatgatatccagaagatccagcagcgattatacgaactgggctatctggcttctgcagaccaggtaacaggcaactttgacgatgccacagaaaccgctgttttaaaactccagggcgtcaatggccttgcagaagacggcaaggtaggccagcagacctataacctgatgtacagcgatgacattaaggcaaatatgcttgcatatggcgaaaagagcgatgtggtattagcatgccagcagcgtttaaaggatctgggctatctgactactacaccggacggtacctacggtcaggacactgtgatcgcagttaagcagttccaggcaagaaacgaccaggtagtagatggttacttaggaccatccacacgtattgtattaaacagttctgacgcaaagccaaacggcctgatgatcggcgaacagggcgattctgttaccagagtacagcagctgttaagcaagtacggctatctgccgtcttccaatgtaaccggctactatggtgaagcaacagaagacgcggtaaagaacttccagtcacgaaacggcctgtctgcagacggtaaagtaggcgtacagaccatggcaaagctgaccagtgataatgttaagaagccggcgcctactacagcagcgtcaactaagagtaataaatcaaatagcagcagcaataagaataatagctcaagtaagggcaacagcggtggaaataccagctcaccggctccgagaccagcttccggtgcaggtgtttcagctttaatctctgtagcatcttccaaactgggaagtccatatgtatggggtgcaaagggaccaagctcctttgactgttccggttttgtatactggtgcttaaagcaggtaggcgtaagccagagttatatgacttcttccggctggagaagcgcaggacgttatacaaaggtaagcaattttaatgatatccaggcaggagatatcgtagtagtaagaggccatgtaggtatcgctgcaggcggcggaacagtcatcgatgcttcttccagtaacggtaaagttgtccacagaggtttaagttcctggtggagaagcaactttgtctgcgcttggcgtatcttctaaattaagttgccccgcgcctgccggcgcggacgcaggtggtacaaattgtagcaaatttgcgcccggccgggcgcagaaggatatatcaataaaaggagggacatttatgcagacgattctggtatgtgatgacgataaacagattgtggaagccattgacatttatcttacaggagaaggctttaaagttataaaaacatatgacggttatgaggctctggaatatctggagacccagtccgcagatcttttgatcttagatgtaatgatgccgggactggatggcatccgcactactttaaaggtacgtgagaccagcagtatcccgatcatcattctttccgcaaagtcagaagatgcagataagatcttaggacttaatattggtgcagatgattacattacaaagccatttaacccgctggaactggttgcaagagttaaatcccagctgcgccgttatacacagcttggaaacatgaaccagcaggcggaaggacaggtctacaagtgtggcggtcttcagatcaatgatgataacaaagaagttacagttgatggagatccgattaagctgactcctattgaatacaatatcctcctgcttctggtaaagaacgcaggaaaggtattttccattgatgagatctacgaaaagatctggaatgaggaagccattggcgcggataacacagtagctgtccatatccgccacatccgtgaaaagatcgagatcaacccaagagagccaaaatatctgaaggtagtatggggcgtaggctataagatcgagaaacagtaggtggcctatggaaaaaagagcgtttggtctgagaaaatggaaggtgcttctgtcagtgtttcatgtgatatttcttgttatcacactggcagggatcagcgccatgtacttaaacggcggatatggaaaagggatccgctggatctatgatgagacttatgaagactcagatgccttctgttcccagcttggcatagatatcagtaatatttttacctatatcggatataaggatatgtttgagaccaatggtgtcctggatatgcacaaacccattgtgcgtattatagacggtcccggtgtagatgaggatatgacactggatcagattgtccgctatgccaagatccggggatattatctgggagaagattttacagtacagggatctcctatggccatggatgatgatgacatggagataacggtagagtataaatccgcaaaaacggacctggcagatattgatggcctggagaccaggatgaccaaagaggaaatggcactggacatcctggaccggttgggaaaatattataccatttattataatttcatcagcaataacacaaatgtccgtttccgtatcctctataaaagcaatgatggaagagaagtggtttataccaatgttccttctatgtctttagatgagctgcggggatttggaaaatatctgttcattcccggaaataccattcgtatggaaagcaatcttgcaacgatcccggacaatgcggcttctcttctggaaacatggaatccctttgacaatgaccagaactatatggtggtctctgtggataccacctatccttattctgataattatgcagaggaagccggggaatataaaagtgccagatccacgtttatcatgggaatgggcggtgtgatcgtaggaattgcaggattttttgctacactggtaacattggtccttttatccggccatgaagatggagcagatggcaagatccgtcttttccccatcgacaggatctatacagaaacctgtgtccttttgtgggcggtggtgacagctgtgatcttgtatttctgcaagagactggggatgatggtgatcggcttatttgtctccgaagaacatctggcatactggagtaaactgctgaaatatgtgatcatctacgggtgcagtattctatgcggtttcagtcttttaagaagatacaaggcagataccctgtggaaaaagagtattgcaaaaaaggtagtaaaggcttctaaggattatattgcaaaagccagttttgtagccgggaccggactttgctatcttctgtttttaggagccaatggcgtaatgctgtggggcattttattcctgtttgcctatatagatgagaaactgacgtttcgtattctcttttatgtatgcgctgttttgtttgttggtctggatggatgggtattccataagctgttcaggaaagcggagcagaaggatcttttaaataatgcgatcacctgtattgcaaaaggcgataccggtttccgcctggatacgaaaaagctgacaggaaaagagcggacagtgggagaccacattaataacattggaagcggcttggacacggctcttcaggagaaggtaaagagcgaacgcctgaaagcggatctgatcaccaatgtttcccatgatattaaaacgcctcttacatccattatcaactatgtggatctgttaaagagacagaagatacaggatcccaagatcgcctcttatctggaagtcctggaccagaaatcccagcgtttaaagacattgacagaggatctggtagaagcatccaaggcaagttccggaaacctgaagctggagatggcagatattgatctggtagagctggtgcagcagacaaatggcgaatttgaggaacgttttgacctgcgccatttaaagatcatctctgatttcccagatggtatgatcattattagagcagatgggcgcagattatggcgtgttctggaaaatctttataccaatgcttttaaatatgcccaggaaggcagccgggtatatgtggatgtggcttctgtagatggaaaagccattttcactatgaaaaatatttcggaaaagccgttaaatatcagcccggatgaactgacagaacgttttgtcagaggagatgtggcgcggaccacagaaggcagcggattaggactttccattgcccggagtctgacccagctgcagaaaggtgagtttgtgatcaccattgacggtgatctgttcaaggctcaggttattttcccgcaagtgcgccaggagaccagggcggaaatgcgtctggaacgggctgcggaagagaagcaggcagaagaacagtccggggagaaaatgtctggggaaatgcctgtgggagagaacctgctggaaagtgccccctataactgggatgtaatggtagaaaatgacaagaatttaacagcaaaagaggaaatcctgatccagaatggaaaacgggagcataaaccggaaacgtaaatagaaaacataaatagtaaaaaaataaatagaaaatgtaaggaagatcctaaaaagagacaggcccacaaggaacctgtctttttttagattcggatttaatgaccggaaactttatagcagaggtgtgacttaggagtattagagagcaggtattcttctgtagtcatgagtactgtgtggagcggagcaaagtaagagataatgttttcggtttctttgcgggaaacttcactgagtccggctacggcatcggtcaggtaaatgactttacagccggcgtcaatggcagaaagcacagtagagagtacgcagcattctgctactacgccggatatgacaagatgccgggctttttttgcggcttttacaacctcggggatggcaaaggaggaatagacacttttggtgaataccgggtatgtttttacccatggaaggaattccggcatcatttcattgagccatggatcagagtttacagccgcattaactttattatattctttccagacaccgtccgggtgttctgtagccagatattgggtaaagatgacctgctttgttttttgactgtttaatagacggaggatggaggcagatgcatgttcaatgcctttacaggcccattcctgtccttttgtataaacattctgcatgtcaatgactaacagcaggtctgatgaattgttttgttccattctgaaaatcctccgggagaacagtattaatgtattttcagtatagttttacacttaaaattttacaagcaaaacaatatgttaatttattaacaataagactctgaattggctcatttcattgactttgtgtaaggataatgttatctttatcgtaaattattgttaaattcataaatgggtgtacattttcctgatttagaaggaacaacatgaaaaaatctggtggcagatatacaaggtacaaagtgtcatacagttgggaaggagattgtgaaatgggagaaaataaaatgccgcatatccagcttccggagaatctgagaatccggtatgcagtgctgccgggagatccggcccgggcagagcgggcagcaggttatttaaaagatgcaaagctcttaaccttcaaccgggagtataaaagctacagcggtttctggaatggtgtgccggttctggtcatgtccaccggaatgggtggtccgtctatggcaattgctgtggaagaactgcaaaagatcggtgtagaagcggctgtgcggatcggaagctgcggtgcgctgcagccggaggtcagagtcggagatctggttatggtagaagccgctgtacgtgatgaaggaacttcacttggatacgcgccacttagttatccggctgttgcagaccacaggctgcttactgcctgtgaggagagcgcaaaggaggccggctgccggttccataccggcattgccagaagtcatgactgcttgtaccgggatgacaatccggttatttatgaggaatgggcaaagaaaggcgtgctggcgtctgacatggaaactgcggcactttttgtggttggcaggatacgtggtatgaggacagcatctattttaaatgtagtggcagcctgcaagggcaatgtagctgaaaacatcggacgatacgtggatggtgagacattgactgcccagggcgaggaatatgagatcttgacagcgtttgcagcgttaacaagacagtaatgcagcaaaaaatacagcttctgaaactggagcgatcaaatgggaaaggatgtatgttatgaagaatttattcaaaactaaatttgatgtggcagtgatcgtattgattccggcctgcatcggtattaactatcttggaaagctgtttgccagcgtgttaaagcttccgttgtggctggattccattggaacctgtatcggtggatgcctgggtggtcccattatcggagcaatctgcggagcagctaataacctgatctacggattttccgcaggtgataatattacgttgatttatgcactgaccagtcttggtattggcgcggcggcaggaatcatggcacgtctgggctttatgaagtccttcccgaaggctatcatcaccgcctgtgtggcaggttttgtggctgtagctatttcaactccgttgaatgttctgttctggggcggcactactggtaacgtgtggggtgatgctgtatttgcagcaacccaggcagctaatatgccggtattcttaggttctttattagatgaggtcgtagtggatgtaccggacaagctgatcacgctgatcatggtattctttatcttaaagggtcttccaaataaactgactactctgtatgaggtaaattctgagattgagactctggactgatcaagaaaaggaaatataacagaacatgaaaagtattagcctttttgtagataacgggacttacctgaccaaggtgcatcccttcaccaaattgatgtacatagccgccgccatcagtattccgctgatttccgggcggctgtggatgtttggcgtgtttattgcggtcagccttcttgtgctggccagtggcaaaattttaaaaaagacccttccgctgattgctttttcctttacgatcttgctgaccatttttctgatccatggattgttcaaccagaaaaacgtcaatgtgctgtttcaggtcgtcggattgaaattttaccgggaaggcatattttatgctcttcatattggtctgaatattctaaatatgctgttgtcttttgcagtatttgtgctttccacaaagccctctgaatttgttgatgagctggaaaaacggggattttccccacggttcggctacattgtgacctcagtattccagatcatcccgcagatgatgggaacgatgaatactatcatggatgcccagcgcagccgcggactggagacagaaggaaatttgagaacccgcgggaaggcatttctgcccctgatctcccctgtggtcatgagttccctgatcaataccagagagcgtgccattgccctggaggtgcgtggttttggcgcaggaaagaaaaaaacctggctgacagagcggacacgccataaaggagaccgtgagatcactatctttttaggtgtctgcattttggcggctgtggtatggaggattgtaggatgtctgtgataaccgttgaaaatttgcgataccgttatccccacacgaaggaactggcgttggatggactggacttttcggtggaaaagggagagtttattggcatcatcggggaaaacggagctggaaagagtacgttaagtcaggccattatggggctggtgccgcagttttataaaggagcttacggcggaatggtcacggtagatggcattgaggcaggcaagactccggtggcacagctgtgcggccatgtgggactggtattccagaacccctttaaccagctttccggcgcaaaggataacgtatacgaggaagtggcatttggcatgcagaatctgggtgtgccggcagaagaaatgaaaaaacgggtagaggaagccttaaagcttctggatatctggcagtaccgggatcgcaatccatttgatctgtcaggcggccagatgcagcgcgtggctattgccagtgtgctggttatgcggccagatgtgatgatcctggatgagcctacttctcagctggatccagagggaagtgacgaggtatttagggcagtggaaaccctgaccggctctggtatcaccattctgatgatcgagcagaagattgagaagctggcggcctactgtgaccgcattctgcttctgcacaaaggaaagcagattgcattcgatacgccgcagaaggtattttctatgccggatttaaacgattatgggatccaggcgccggcatttacccgcatttgtaaagcagaacaggtgactctggcagatggaacgtatccggtgacagtgaaagaggcggcggaagtgctgagagagaagcggctaggtgtatatgagcatgcgaatgcggaagcaggtgtgcaaaaagcagtgggagcgagtgcggcaggcaccggacaggtacaggcaaagaacgctgaaacaggcgcaaggtccgggcagtctgggacttgcaggaaggctgaaaacgttgcttctgtggatgagcagttccggattgaaaaactggatttctcttatctggcagatattccggttttagaggatttgaacatgaagctggatcagcgtcctaccgccatcatcggccagaatggagcaggaaagaccacgctggtcaaacttttaaagggtttgttaaaaccggtttcaggttccatttatttccacggtgaggacatttcaggcaagacagtggctatgctggcaggaagtgtaggttatgtattccagaatccggatgaccagatcttcaagtacaatgttatggatgaggtcctgttcggcccgttaaatatcggcatggatccggaacaggcgaagaaagaggcagcctgggcgttggaactgacaggactgtctggcaaggagaaagaaaatccctacgatctggaactttatgagcggaagatgacagccattgcctcagtacttgctatggacaccgatgtactgatcctggatgagccgacaattgcccaggactggaaagggcggcagatcattggcagcattatccgcagcctttctgggcggggcaagctggtcatagctattcttcacgatatggactttgtggcagagaattttgaacgggttatcatcatggcccatggtcaggtgctggcagatggaactgcaaaagaagtatttgcccaggaagaagtgctgaagaaggcacgcctgcagaagccatatgtgatgcagcttagcgaggcacttggatatgagaagagctatctgacggtggaggaacttctgaaagatcggatgtctttgtgtgctgcaattaagctttgaaaaaattccattacaaaaactcctgcctaaagcaggggtttttgtatttggacatagaaaaacagcgaataaacaaaatgttacccactgcaaaaggaattcttaattaaaaagacaggctcgcagggggcctgtctttttctgaccgtaagtttgcagtccgctgatcggcggtcctgcctaaatgtgtaaatagattttactgatactcaaatacattgatccagctctctaacagatctttctcttccggacgcttataagccagctgtgcggctgctacgattggaagccagccctgtacatagcgtttttctgtacctgtcttttcacagaacagatccatgtacagttctgctttctttttgtcctttaagctgagcagaagataggttctggccacgtcggcacttgcattaccctgggaagcatgtacccagtcaatgacatagagctttccgtcatcaccaacaatgatgttggatggattgaaatcgccgtggcagagtttggtgtgttttggcattccgtccagtctggtcaaaagctcatagcgtgtgctttcatccagctgttccacggattttaaggaacggatggtcttttctttcagtttgttgagcagcgggcaagcctggctgtggatcaacagctgcagatctaccatctgggacatgtactcgtccagcttgtccggattttcatccatcagctgttctaaggtcttacctggtacatattccttgataatagaccattttccatcagttaccgttacccccaaaatctttggaacattgagcgcttcaatggtctccactcttgcattacataatgcctcgtttaaaacctcagctttcggaaatccttcgcagaattccttaatggcagtatcttcgtcacggtagacggccttttttgcactactgaaaatcatttcttttgccataatcatactctccttccacacattatatacggtactgctgcggtgtgaactgccgcatcgattattattttactacaggaactgttaaaagtacagcagaaattgataaaaaattaacgaaatttattttttatcaggaactggaaaagtgggtggacgcgccggggggcgcgtctcaggtacacaaactgtgaaaaccggatccggacaaaatctggatcaaggtttatggaaattagaaccggaaaatcgccgttccatatccacctaacggataagaaatagaatatggctgtccgtcacattcactctttacggatgtataagtagggcactggctgggcttataagcaccgtgaacattatccagaaggagtgacagcttgcagcgtttcggtacacctacacggtaatccgggcgatccactggtgtgaagtttactacaaacagcaggtttttctttcctgtctcatccttgcggataaagctgaaaatgctgcggtccccgtcatttgcattgatccactggaagccgttccagtcgttgtcaagctggtacagacaaggatatttcttataaatatgaagaagatcacggacatattcctgaagctttttatggctttcttcttcagctaaataccagtcaaggctgactttttcatcccattcatgccactggccgaagtcctgtcccataaataaaagcttctttccgggatgacctaacataaaggtataaccggcctttaagttggagaacttgtcctctccaagcccaggcatcttattgatcatggaacacttcagatgtactacttcatcatgggagagtactaaaatataattttcactggtaaaataggtcaggctgaaggtcatgcggttgtggttgtatttgcggaaatacgggtccaatttcatgtattccaggaaatcatgcatccagcccatgttccatttaaaggtaaagccaagtccgtcattttccgggtggtcggtgactttcggccatgcagtagactcttctgcgatcatggcaacaccgtggttgcggccctggacaacggtatttaagtgtttgaagaattcaatggcttccaagttctggtttccgccgtttttatttggcacccactggcccggttcccggccgtagtccagatacagcatagaagcaacagcgtctacacgcaggccgtctacatggtattcttctacccagtagagagcgttgctgataaggaagtcttttacttcatttttgccgtaatcaaagacttttgtgccccagtccgggtgctcgcctttgcgtggatcctcgtattcaaaaagaggatgtccgtcaaaatcagccagtccatgggcatctttcgggaaatgggccggaacccagtcaaggataacgccgatgccatttttatgtaaataatttacaaaatacatgaagtcttttggacttccgtaacgggatgtaggggcaaaataaccggtcacctgatatccccaggagccgtcatatggatgctccgcaatacccataagttctacatgggtatagcccatttcttttacataggcagccagctcatgagccgcttccacataggtataatatccgtctttttcttcccggtctttcttcttccaggaacctaagtggacttcataaatgctgatgggctgtttggtcatatctgcctgggaacgctttgagatccagtcactgtcattccaggaaaatccgctgatatctgcggtaacggaagcagtacccggacggtattctgcgctgaaggcaaatggatcagctttgtaaaggatctttcctgtatcggtggtaatggcgaatttataaagctctcctacctgcatacctgcattaaaatactcccagataccggattgtcctactttggtcataggattggcttccgggttccagccgttgaaatcgcctaccaggtggactgcctgtgcatgtggtgcccatacgccaaaataaatgccctttttgcctttataggtcataggatgagcgcccagctttttatagatctcgtagtgagtacctgcgccgaataaatagcagtccaggtcggagatcaggccggtgttggcggaagcttttttagaaggtgtgctttttgctgcagtttttgttccagcgcttcttctggtggttttatgagctgcggtagttgtatttttctttgtctggcctgcctgctttctcattgtcatattaattttcccccttaattttaaggacagcaccccagttgccctttaatttaatttccagtctgccgttttgtacaggcagaacgttattttcacaggtttcattatcgctgtttaaaagatccactgctgtctgtgcctggatcggaaccgggatgtttaatgtggcttcattgtcatcattatttaaagcagtgatgatcaggctgttatttccccatcttgcgtaggcatactgcctgttggtaagaagcagttcctggtattttcctgtgtgcagttcttcattttcttcatggatctttccaagtctggaaatgaaatcggtaagctcgcagtttaattccggtattttttcagccggaatgcagggacgcaggtcatcatcacaggtagaagtacgttttccttcggtgccccattcaccgccgtagtaaatagacggaattcccggaagagtcattaaacaggtgtatacaggatacagatgctcttttacctttaatttgctggcaatgcggtcttcgtcgtggttgtcaaggaaggtataaagctgtcttccaatggcttccagacggcggacattatgtgcgatctcaaagaagttgtggtcattaaagccggagtaaatgctcttgtgcagctcgtagttcgtaacagaatggagcatttccgggttcacccagcggctgtaatcaccgtggatgacttcacccataagccagaaatccggtttcatggaagcggtctttgcacgcatttccttcatgaaattaaagtccaggatattggcgcagtctaagcggatgccgtcaatgtcaaattcgtccacccagaaacggatcacatcaaaaagataatcttttacctgctggttataaagatttaaacaaggcagttcaaaatgtccctgccatgcttcatagccaaatggatcccctaaaggactctgccagccgaaatttacccctttgtaccagtctttgtaaggggagtcccatttcttttcctggatatctttaaaagcgaaaaactcacggcctgtgtggttgaaaacaccgtcaactaccactttaatgccattttcatggcaaagctttgtaaattcgcggaaatcatcgttagttccaagcctacggtcaaccagtttgtaatctctggtgtcatatccatgactggatgattcaaaaagaggacctatgtagatggcattgcagcctaaagaacggatatgtgggatccactgatccagttctttaaaccggtctgtcacctctgtctgcacgtttatctttggagctccggttatccccaaaggatacatatgataaaagatagcttgttcataccaggtactcatgttgtcagtcctccatgtttttgaattttctcagtaaaaactgatagcgcagctgcgcggcattccattcgtaaatatagcagtcgatcagcgacggctctgtggcctgctcaaaatggttctgggctgtttccagggcccagagggtgcgctcaatatcatcccacagtttccgtcttgtaaaaaccagatcctggtttacaggtgctgcggctgcagcttcgcgaatggcttttaaaaatcccggcataaatcttcatctcccaacttctgactggtttactttggcatcaattagtatatctgggaaaaaaagaattatgcatggattacatgaactcctccagtctgtatcccagctccataagagaccgggtggagtcacgtaaggtgagatagtagtaattggctgtcccgtcctgacgtacacctaccagacccgcatcttttaaaattttcagatgatgggatatggcaggtcgggaaaggctggtgcggcgtgtgatctcgtttacattcatggcatgaccttcaaagtcgatggttccctgtgggtcctctgatctcacggctgcttctgtaagaagttccacgatggaaagccggaccttatctcccaaggcaataaaaaggggcatgcagcaatgaaattgcttctgcagatcctgtaccgttgtcataaccgtcccctcctttggtttaaatttttaaactaatagtattttaccattacagggcatcggggtcaatagaaaaatacctcttgacaggagggggaaagtacggcataataaggtcacattctttgaaaaatctatttttcatttttaattctgtaatttttagtgcgatttttcagcacaggatccagttgtgagtttaatcagatacagggataagtgggtcattttgtgagtttatgttttggtttgggaggtgagaaattcggtttatgggagtttaagttatttaagtcagagtgtattctgggggacattgcttttggcagcatggtctgactggaaatattacaggatccctaacaggcttattatttttgggatagtgtccgggatcatgtcactggtttttcaggctgcggatttggaagcagggagtaagatcccatggctgctgctggcactatccggctttctggtccggggagtggctgtgctggttttggggatatttttacacagcctgggcatgataggagccgcagatctgaagcttgtggcgcttcttgcagcctggctgggcttttcggaaacaataaaaattttatgtgtaggatttatcttaggggctgtctggtcccttcaaaaaatgttgcgatacggcagcgcttttcaacgatttctttatttgtcagcctatatcaggcagatactcagcaataaaaaaatagaaaaatattatgatccggtccgggatggaacagaatgtgtgatccctttgggaacctgcttttgtatggcaaccgttctggtctttctggaaaaatggatcttttaggaggagaagacatgataaaagtaatggtcgtatatgacgaagatcctttgtatgcagggcgtttggccgaatatgtaaaccagaaggagacatttccctttcaggcaatggcattttcagacctggaaaaactgaaagcctatggcagggaccatgagattgccattcttttagtgggagaaagagtaagagaggaagcaaaggagataaaagccggattaaaaatgcttctctgtgacggggagtttgtgtcacaggaggaagcctcggtttataagtttcagtccggtgactgtatcttacaggaagtgatggcctgttactgtaccgttcccccggagccgggactggcacttatgggaaaaagggcactgatcatgggtatttattcacccataggacgctgcggaaaaacatctttttctttaacactggcccatatgcttggaaagagccagggcgttctttttatcagcttagaagaatattccggtttttcaaagctggtctgcggtggatatgaacaggatctttccgatgtgttttatctgtacaggcagggagattttaactggctgaaattaaaatccctgatcctgtcccatggaaatgtagattatatcccacctgccgcttatggggaagatttagaccaggcccagccggaagagatcgcaggtcttttaaaacagatcgggacagaaagcggttatgaacggatcgttgtggatatgggacacatgggaaaagggtctttggagctgtttgcagcctgtgatgttgtgtacatgccggtgttagatgatcctgtatccactgcgaagttagaggattttgaaacctatctgaaagaagcaggccataaaggcatggaagaaaagatacagaaactgcatctgccggaaataaaaacagggatccggctgggcggctatatggagcagcttctctggagcgaaatgggcgattatgtgcgaaaacttttagaagggggatattaaaaattggaaggggaacagggcagtttaaacggaaggcgggaagtgatccggggagagttaagaagaaatgtcatggggcagttaaaagatcagatctatttagaggatgaacagctttatgaacagatcgatacagcgatccggcaaaaggggaaagaaacttatctgcctttaaaggaacggctgtggctgcgaaacagtctgtatgacagtttccgtcggctggatatcctccaggaacttttagatgataaagatgtaaccgagatcatgatcaacggggcgggaaagatctttatagagaaaaagggaaacatggtcttatggaaccgccggtttgaaaaaacagagcagttagaggacattatccagcagatcgtaggaaaggtaaaccggatcgtcaatgtatcttctcccattgcagatgccaggctggaggacggatccagagtccacattgtactgccgcctgttgcacttgacggtccggtggtgaccatccgtaaattcccggatcccattaccattgagaagctgatccgtttccaggcactgacagaggaagcagcccagtttttagagcagctggtaaaagcgaaatataacctgtttgtctgtggcggtacaaactccgggaaaacaacttttttaaatgctctttcctcttttataccggaaacagagcgtgtgatcaccattgaagactctgcagagctgcagatcacccatgttcccaatctggtgcggttagagacccgcaatgccaatacagaaggagaaggtgagatcaccatcagtcagctgatcaaagcctctttgcgtatgaacccctccaggatcattgtaggggaagtaagaggggcagaggccttagatatgcttcaggctatgaatacaggccatcccggttctttatctaccggtcacggcaacagtccccaggatatgctttcaaggttggaagtaatggtgcttatgggagcagagctgcctttagatgcgatccgcagccagatcgcgtcggcccttgatattatggttcatttgggaagattaaaagacgggagcagaaaagtattatcgattgtagaaatagggggatataaaaatggaaaagtggaacagaagccactttttgtctatgacagagaggaaaaaagacttaagaaaacaggggaacttaaggcgagggaaaaacttgctgatgcaggagattaacagaaaaaggtggagcaggtcttctggcagggaaaagcagaaagaggatttaaacggcagggcaagaccgccggattacagggaatatcaattatcccaaaaagaatggatgcaatatctgatcatgggagccggggcagcaggactttgtgcttatacattttatcgcagtgtacttgcatttttatttcttcttccagtggcttttctgtatccggtctataagaaaaaggatctgaaaaaagaacggatccgcaggctgacactgcagtttaaagaggggatcatggttttggcatctttcttaagcgccggttattctctggaaaacagtctttcgttaagtgtaaaagaattggaaggcctttatggaaaaacagggatgatcacagaagagttttcctatatggaagcaggggtaaggatgaaccgtccggtggaactgcttttagctgatatgggaaggcgcagcggtattcaggatgtggatcagtttgcccaggtatttgcagcggcaaaacgaagcggaggggaactgacggatattataagccagacggccgggatcatccgtgacaagatacaggtacaggaggagatccatacactgacagctgccagggtatttgaacaaaagatcatgaacggaattccttttgggatcatattgtatatcgattttacatcaccgggcttttttcatgttatgtatgaaacctggctgggtcgtatttttatgacagcgtgcctggggatatatgtgggagcagtatttctggcaaagaagatcctggatatcccattataaggcagatgaatgtatgaaagaaacgaagagaaaattttataaaaagatctgtaagtggaaaaagcagattttatgtgtgggagccggtatttttctgggaattgctgcatggctggcacagggcatggatcctgtaatagaagcaggaaatgtgatccaaagaccggatatcgatgatggacaggtggaccaggaactgtatgtaaaggggcttgtggatcaggagaaggaagtggttttaaaactgcctgtttctgcaaggcagtatacaaaagaagaagcatatcaggcatatgaggaaatcttaaaacagcttccggaatggatcaaaggggacaacctttcactggaagaggtaaggcaggatctggagctgcctgcatactggcagggagcaggagtgcatcttagctggcagtcatcggatccggaactggtggaaagtgatggaacggtgcatacctgggagtttgaaacaggggatgaggctatcgatcagtggccggtcatcttaaaagtgaggatgacagatggaaactggccggaagaatatgagattcccattaaagtcaggcctccattgtatacagaagaagaacgtaccatacaggaatttacatcacttctcacatcagaggaagaggtacagaaacatcaggatcaggttacactgccctctgtatacaaagacagggagatttcctacagcacagccagggaacctgtatttcttcaaatgtgctttctgggggcagttgcagcggtatttataagcctgaaggaaaaaagcgacaaaaagaaagcagaagaggaacggaaagaccagctgcttatggattattccgaggtgctgtcacggctgatcattttcctaggggcgggcatgagtatacgcactgcctgggaccggatcgcagaggattataaaatggctgtgaaagaaggacgcagagggctgcgttatgtatatgaagaaatgtatgttaccagcagtcagctaaaaagcggggagtcagaagcacgtgcttttgcggaatttggaaacagatgcgggctgcagcagtacaggaagttttccgggcttttagagcagaatcgaaaaaacggctctaaaaatttaagggaaacactgcggttagaaatggcagatgcctttgagcagcgtaagcaccaggcaaaacgtatgggagaaaaagcaggtacaaaattgttgatcccgctgtttcttctcctggctgtggtgatggcgatgatcacggttccggcatggatcgcgtttggttaaaaggaggatatgagatggaaaagcaaagagataatcatatagaacagaatgtaacggaacaacatacaacagagcagggcggaatttatagaaagatcagggattttgcgctggatgaaacaggtgtgggggtgatagaacttgtgctcatcctggtggtcctggtaagtcttgtgatcgtttttaagaagcagatcaacacacttttagaaaatatcttcaagcagatcaatacaaaatcaaaagaggtttattgatgagagaaaagggagaagttaccgtcttccttgcgatgatcctggtgatgatcatgacacttttgctggttatggcagagtcagcccgtacagcggggcagcggctgtatctccgagtagcttcaaattcagcaatggagtctttgatggcacagtatcacagaagcctttggaatgaatacaggatccttggactggaaacggacagtaaaggccttttagaggaagaatttaagggctttctggaaccttatatgaaggcaaaaaactggtatccgttgaaaacagaggatgcagttgtaaaagacatggcagtgctgacagagggaaaaggcagctgtatggagcaggagatccttgattatatgaaatatgggctggcaggtatactctgggagtctatgacagaaggggaagccaaaaaagttctgggggatataaaaaatgcggccagtgtgaaccgtgtgtcagatctgtatgaagaacacagcaaagaagcagttgcccttgaaaaagcccttgaaaaattaaatgccagactggaacagcagaaaacacactgggaagaaggactggactgcctggaaagcctaaacggcgaaggcatgatccgaaaatgtgaagctgtgatcaaagacctgaaggcagttccgggactggtggaagcttatgaaaaaaaggcagaccagatggaacgcgcccttaaaaaaagcagggagaaatttgtatccgaggaagatctaaaagagtcttcccggggacctttaacaaaagagatccggtcttatgaaacctacatttcccaggacggagaacgaagaaacatgatccggggacttacagaaaaaagcagggaaaatatccggtttatggaacagctgatagaagaggcagaagaagtgatccagtatattgacgactgggaaccttccgatgaagaggatgatctggatgaagaagaactgtgggaaccggtgatccgccatatgagccggtatccggttctgacattgggagtttcttttggagtaaaagacaaagaaaaagagggatggttagagaaaatcaaatcaatgagtggaaaaggcattttgaagatagtattaccgccagactgccaggtttcagaaaaaagactgcctcttttacaggcaccgtctgctctttcaaaaaatgacactgcacattttcaggggatttccagcttgatggatcgtttaacagtatctgagtatggggtgcggtacttttcccattttgaaaaaataaaagacaaggataatttttacgaacttgaatatattttatatgggaagaaaacggacagggaaaacctggaggcatctgttttaaaactggtttctgtacgccagggactgaatatgatccatatattatcagatggaaaaaaacgtcaggaagcagaaacgctggcagcggctataacaggaggtggtagtttgcttccgctgacagcagtggtaactttttttgttatgggtgtgtgggctttggcagaggcaatggcagatgcgagaagccttttagacggtggaaaagtacctcttatgaagacaggatctgactggaaaatgagtctggaaaatgttttgaaaacaggagcagaaggaagacttccgaatcttgaaaaaacggatcctgaaaatgaaatgggactggatctgaaaggatatctcaggctgtttttatttgtaagttatggtacgcagcctttatttcggatgatggatataatgcagatcaatatccgcaaggaacagccggactttttgttagaacaatgtgtctgcatggtggatatggaagctggattttgtggaaaacctgtatttttttcttcaggtccgtggaaaactgccggaaagagccgctttgctgtaacgggaagttatctttctgttccctgaatgacaatgtacccggacatattccgggagaatattacaaaagaaaggaggcctgtgatgatgccctttttcaggagcaaatcttattctaattatttaacacgacactccatttataaatcaaaaaaatttttcgcacctctccaagtacgaacccataaatatgtagcacttttaaaacagaaaaaattttccggaaaaagggcattatcatgggtctcctttggaggacggagaaacattacagaggaaaaaagaggaagtcttacattagaagctgccctttgttttccgctggtggtatttttctgcgtgatcctgatcatgcctatgatcctgatggacaggcaaaggcagatccaggcagcagtcgagtctgtgggagaagagatcagccagtatgcctatgtttcttatctttataaatccggaaagggagaaacattagatgtcagtggcacaaacgagcgggaaggtagtcagcttcttgaaaaagtaacagctgcatatgctgttgagtcagtgaaaagaaagatttcggagcaatgggtccgggatcttagcttttatgggacgcagatcacggaagatgaaatgcttcagatcattatgaaatataaaatgccactgccattttccctgtttggccaggatagtgtggatgtggaaacggtttgcagccgcaggttgtggacaggggcagatggagaaagaggaaaaaagaaggcagaaaccggggaacaggatgaaagaatggtttatataggaagatcttctacacggtatcacctgcaaagcacctgtcactatctttttcacaacctgacccagatccattcagatgatcttgtaagtatacgcaatcaggatgggaaaaaatataaatcctgctctgcctgtaaaagcagtgaaaatgccggtccgtattatgtccttccctatgggaccagttatcacagcagggaagattgccggtcgcttagtgcatatgtacaggaagtgcccttgcggcaggtggaatatctaggtccctgctcgtactgtgcgggcggaaggtaaaaatgaaaaggagaatacaaaaatgaatatgaaaatggggatagaagcagcactgaggatctgttttttattatttttactgtcagcttcctggcaggatctaaagaaaaagactattaaaagaagttcgttcctgatatggggaacggtaggggtcattcttcaggcagcacatattttcagccagatttttatgggaacagaaaaaatgggaatgcaggtgatcgtacaggaagttacgggccttatgtttgcagctttattgggaattttgttattaagcctttctactgctacggaagaagctatgggaaaaggagatggctgtttctttctggtagcagggatcttccttggtttctggaaaaatatgctgctgttatccggcggtctgtttttatgtttcccggcagctgtttatctgatgataaagggaagaaaagcgagaaatacagaaagcatcccgttcttgccatttgtgtttccggtgggactgggggtcctgtttttatgaataaaagaagggaaactgtattaaaagatgaaagaaaaaagcgaaaatccatagaaacagaatggaagggaagccttacagtagaggcttcctgtgttatggctgtggtgctgttttcgctggcagcccttataggaaaagcagggcagatccatgatgaaacggcagcagctatggtgcttcacgaaggtgtagaaaaatgccgccatgaaaaaaatataagatcagaagatgcggaagcgtttttcaaaaggaatgcagggctgatgctgcggtatacggatcttactgtttccatacaggaaaagggagcaaaaaagatgggaaaagtgaaaggaggggactgggaaaaacagattgagatgaaagaattcagaccggaagaatttatgcggatggtcacagggataaccgggggtacaaatgagaattgaatatatacgggaaatgaagcgcagctatatgacagtaacaggggaaggagtgggggaaagctatgaaaccggcatgctggctaaaaaccagatctccggtcttctgaaaatgaagataaaatacatggatggagtacctgtatattgttatgatattacttcccgccagcctgtaagccggctgtttgaaagccggcctgcaggtgaaaaccaggtgagaagtttttttctgcagctttatgaaacattagaccggatggaagcgtatcttttaggtgatggagggatccttttagatccggaactgatctacgcagatccggaaacctttcagatgggcttttgtgtggtgcctggaagaaaggaagattttaacagccagttgtctttattcctgcaatatcttatgaagaacatagatcacagggacagggaatgtgtggttcttacctatggactttaccagactagtatgaaagataattatgggatggaagatatgatggcacttctttctaaggaagaggcaaaagatttaaagacggaaaaagatttgcttatggaacggaaaggagaaggaaaaacagaaacaagaccagaaataaaaacagagaaagaagatatggcagaagagtcatctttgtatgggcttgaaaatgatgcacaggaggaacgggagctattttctgaagaaagaacgttcgcaaataatggatggagcctgtggaagaaactgttacttctttttttaactgcggttatggcagcaggcggtacctggtttctgtatggctggtctgtattaagaaaaatgtgggtctatggggctgcagggtttggaattgcaatattaggaacggttttgctgcatatgatgcgaggaaaaggcaagggtttgttgcctggaaaatatggaggaaccggcgcaaaagagccggaaaattcctggcaggtattttatgaagagacagaagaagcgcagaatgcagagaaagcagaagaaataagacagggatcagcgccggaaaaaataccgggatatgtacctgcaagagaaaagacagcagaaagacagcaggaaaaacaattagaggaacctcaggaagaatgtcagaccatgctgcttactgtaaaagaggagccggatcatatgctggtatcggcaggagaagaaaatgaagatattgcagtgggatatgttccctttgtgataggaaaacatacagggctggcggactatattttaaataaaagtacagtaagccgttttcatgtaaggatcacagaggaggatgggcagtattttcttacagatctgaattccacaaatggaacaaaggtcaatggaaggctgctggcagccaacgaaaaagtggtgctcagtcagggggatgaagtgtggatcgcagaggaaaagtacctttggagatagaaaaagtcataaaacgacaggaggtgacagaaacagacatggagaggggacgttttttttgagatattgcagaaatgcgcttaacaagggaaaaaaattatgctagtattataaacaagaaaagcgcttatcgacacagaagaggaggaattaaaaatggcagaagataattgtattttttgtaagattgcaaggggggtgattccttctacaactgtttatgaggacgaggatttccgtgtgatcctggatctgggtccggcatcaaaaggacattcactgatcctgcctaaaaagcattttgccaatgtatgtgagctggatgcagagacagcggcaaaggtgcttccactgggagcgaagataggagctgctatgaagaaggggttaggctgcgccggatttaacctggttcagaataacggtgaagcagcaggacaaactgtaatgcatttccatatgcatgtgatcccgcgttatgagggcggtcctgctaatattgccaactgggtaccgggtacagcatccgcagaagaattaacggaagcagcagagaagattaaaggctgtctgtagtcacttatgatcaaacgtatggatgaagaagcaaaagcgagttttgaagaaatgtatctgacctatcaggataccttaagacgtcttgcttatgcttacgatataccagtggatgatattgacgatatcattcaggacacatttgtttcctatgcaaggtatgattattccctgaaacaaccggaagaggggaagaagatcttgcttggcaggatccttagaagccgttgtatggattttcacagacagaaaaagaaacgatattgtgaagatctgaatggagaaacgtttgcagccgaagagtacaggatgcagctgcatcagcctgggttagtagacgttttctccggaaaagagcggtgcaaagcgatcctggacgaagtggaccgtatgccggaaaactggcagaaagttgcggagttgaaattaatagaaggacggccaaccagtgaagtctgtgatcagctttctatttcagagaaagcctgctattcacgggtcagccgtatcagaaagtacataaaatcacttttgaaacgggaagactggccctagacaggaccatgttctcccgaaacaaagggaaatccgttgctggccatgcaatgcatgaacagtaacaatttaagaatgggaaacgcaggactctatcaaagaggtaatggtttctaccgcattgctgagactgcttttttccattgcattgatataggtttccctgtttttgtaaagatcaaacacagcagtgcttaaggctttatctgaaagatcttcttcttttaagactttgctgaagccctggcgtgcgaaggaatctgcatttaagatctggtcaccgcggctggcagcagcagaaagcgggatcagaaggttgggcttacgtaaagccagaagttcgcagatggaattagcacctgcacgggagatgacgacatcagcagcagcaaagagatgctttaaaggtgcatctacatattcatactgtacatatccttcggtaccgatcaggctttcatccagattgccttttccgcagatatgtattacctggaatgtatttaaaagctgtggaaggatctttcgtaccgctgtgtttacagcaacagatccaaggcttccgccgatgatcagaaggacaggtttatcttctgttaaatgagcgtaggacaggcccgctttgcggtcaccttctaaaagttctgcacggataggagaacctgtaagaacggctttgtcttttggaagatatttcagtgtttccgggaaattgcagcaaacttttgcggcagatggaatacagatcttgtttgcaaggccgggagtcatatcggattcatggataataacgggaaccttataatgttttgcagccagaacgactggtacagcaacaaaaccacccttggagaatacaacatctggtttataacgcttcataaggcgaagtgcctcaaaatagccttttgctacacggaaaggatcagaaaaattcttcagatcaaagtatctgcgcagcttgcctgaggaaatgccgtcgtaaggaatgccggcgccttcgatcagcttgcgttcgataccctggtaagaaccaatataacggatttcatagcctgctttctttaaagaaggaagaagagcaaggttgggagtaacatgaccggcagtaccgccgccggttaaaatgatttttttcataaaaacctcctgaaggaaaaacatctactaatatagtaagcattaactgcaaaaagtcaaccctaaaccgagagggaacttaaggtatttgacaactgaggtgtaaagtgggaaaaacaggaagattgaacttggaaatgaatgactggatgggaaatcaaaataaaaagagggaaaaactgactgacagtgatattttaaagcaatttgaacaggcagaaaaagatacccgttttttgcctatcaatccgccgccaaaggatgagtttgaccagatctggtcacggatccaggcggagcaggctcttttctcagagatttccaatacaacgaacaccaaatcatcccgtaaaacccgcaggcgccctgtaagaaaagcactggttgtggggctggcagcagcaattatggttattggcggatgctttgtggccatgggaacgaaatcttatttttatcgggatgggagaagtgtaaatcagggagtagtttataataatgactctggagctttgatggttcgtagtgaagaagaggcatatgagaagatagcggaagaattaggagttaagacgctgaagttggggtatatgccggaggggatgtattttgaaaagctgattgtggataaagggtatacaaaattacaatataaatataaagatagtaatatattttttattcaggcaaaatcaagcttaagaacttctataactcatgcatctgatacgaatgaaaaatatgaaatatggaatgctggattacatataaatataaaggtatgtgatgagagtgtaaaatcagaagagtggggctatatggcggagtttgtttataatggagtgtattactatttatcaggaattatggagcagaactattttgatgaaatattgaaaaaaattcatttctaaaatgtatggaggcttaatgaaaaaattaatacgagcaatactatgttgtctagtagcaatcaatgtatttatgttaactgcatttgctgcagttccatcaccggaagtatatacgtctattgatcagaagtcaaatttatgtgatgtaaaaacaaagtatagtattggaagggcgcaatctaatgcaagaagagggactttttttgactcggcagatgtaattatacgggatgagggtaatggaaatattggagcatctgcacatgcaaatttaagaaagcctgtaacagaattatatgtttctctgtatctggatcggtataataaagaaaaagatgtatggcagcaggttgattatgttgactttgaatatacattagagcagtatccagatggtatagaggatccgtccattagtgttacattcacaaaccagaaacgtggctattactaccgcatcagaggagctttctccgcaggtgatgatgactggtacgaaggcttcggaccaactaccgatggtatttggattgaataagatatagactatccaacacaatttaattaagtaataatccataagtaatataacttgaaacttagaaaagcagcttcccacccaagggcaattgaaacactcaatcccctggcagaagctgcttttctaacatttaaggtaaaactgtcagtggcagttctgcttaatatcatgtataataactcgatgtaggcaaaatgattgctctgataccgaattgctacgtgctttgcactctcgcaattctaaaaacattcgtaatccgctcatttttcttcaaaaaatggcttcttactcatgtttttggcgggccccaaggtcaaaactccttctgcaagcaagcttgcgtcggatttccgaccttttgaccctggtatcataatattacatttcataaacattgaggagaaatataactatgcgtgattatttaaacagactcagacagcagtttcagcgctttatgatcggaagatatggaatggaccagtttgggcggtttctgtccggtgtgcttttagcgttgatcatctttaatttactgatcccggcggctctgccttctagaatattatgggcactggaatggatcgtgctcattatattgtatgcaagaatgttttccaaaaacattaataagcgttatcaggaaaatgaagcctttttaagacggcagttttatgtatcagaatggtggaagaagtggaaattccgctatcaggaaagcagaaagtatcatatttaccgttgtccgaactgcaaacagaaagtgcgtgttccaagaggaagaggacggatcagcatccactgtccgaagtgcgggactgattttatcaagaaaagttaataaaagactgtattacaagaccggctgtatggaagctggtcttttttgcgattttatggcgcatttttgtgcgtgcaatctgatcgatttacttaaattttacaaaacctataccataccttgctttcagccattgtaaaacttttgtatactccacaatgtaagaacaagaaaacaacaaagaaaaacataaataccgcaaaacaatacaaacataaagcggtacaaaagtggaggaaaagataattatgaaaaaaaatggcatgaaagtaatggcaatgatcggttctgcagtaatggcagcaggtatgcttgcaggatgtggaaactccggtgcagcagctaccacagcagctccagcaactacagcagagcagacaactgaagcaaaggcagaagagacaacaaaagaagcagcaacagaagcaaagagcgcagatgcagatttaagcggatccatcagcatggtaggttccacttctatggagaagttcgcaaatgcattaagcgaagcatttatggagaaatatccaaaggtaacagtaaccgctgagttcgtaggttccggcgctggtatcgaggcagtttctaacggaacagcagatatcggtaactcttccagaaacttaaaagatgaggaaaaagcaaagggagttgcagaaaacatcgtagcaattgatggtatcgcagttgtagttgatcctgcaaacacagtagaagatctgaccaaggatcagctgaccagcatttatgacggaacagtaaccaactggaaagatgtaggcggaaatgatgctccaatcgtagtagtaggacgtgaggcaggttccggtacaagaggtgctttcgaggaactgttaaagctggaagatgcctgcaagtacagcaatgaattagacagcaccggcgcagtaatggcaaaggtagcatctaccccaggttccatcggatatgtttccctggatgtattagatgacactgtaaaggcattaaaattagacggcgctgagccaaccgaagagaacatcaaggcaggaaagtactttttaagccgtccattcgtaatggctaccaagggtgagatcagcgagcagagcgatcttgtaaaggcactgtttgacttcatctactctgacgaaggttctgaacttgtaaaatctgtaggtctgatcacagctgacaaataatcagtggacagataacacgaaaaagaaataaagacgataaaaagtgtgagtcatacaaaacgaaaggagactgtctgcaatgacacaggaaacattttccgtccgttcccatcatggcagcaagtctacagtagaaagagctgcagaagcgatcttcaccgcatgcggctttttcgctgttctggctgttgcttccattacattatatatgatattcagcggtacaccggcgctgtttaaagtaggcatcctggatatcctttttggtaccttatggcagccggctgctgctacaccaagctttggtatcctgtatgttatccttacatccattgtgggaacctttctggcgatcctgatcggtgtgccggttggcgtgatgacagcagttttcctggcagaagtagcgccgaaaaaactggccaatgtagtccgtccggcagtagagctgttagcaggtatcccgtccgttatctacggtctgttaggtatcctgatcttaaatcctctgatgtataaaatggaactggctgtatttaaaggttcttctactcatcagtataccggcggcgcaaacctgatctccgcagtgctggtactggcgctgatgatcctgccaaccgtcatcaacatcagtgagtctgctttaagagctgttccgggtcatttaaaaagcgcttcccttgcattaggcgctacaaagatccagactattttccaggtgatccttcctgcagcaaaatccggtattatcacagccgttgttttaggaacaggaagagccatcggcgaggcaatggctattacactggtatccggaagttccgtaaacttcccccttccatttaactccgtccgcttcctgactactgctattgtagcagaaatgggatatgcatccggactgcacagagaagtattatttaccatcggtcttgtattatttgcatttatcatgatcatcaacattggtttaaacagtattctgaagaagggagagaaaacaaaatgacaggtgaagccgctatccgtatcaatggaaactccgtgatccgggaaagcatttatggaaaacgcatccgcagcacagatgtgatcttaaccggtattatctacggatgtgccagtctctctatgctccttctcatcggaattttaggttatacctttgtaagaggtgtcccacatgtgacctggtcctttttaagcactgtttccagcgctacaaagggaactttcggtatccttggaaatattatcaacactctttatattgtagtgatcactctgctgatcgcaactcctattggtgtaggttctgctgtttacttaaatgagtatgcaaaaccgggaaagatcgtccgtctgatcgtatttacaacagaaacactttccggtattccttctattatatttggtcttttcggaatggtgtttttcggaaatacactgggactgggctactccattcttaccggttccctgacactgactttaatgatccttccactgatcacaagaaccacccaggaagcattaaagaccgttcctgacagttaccgtcacggtgcactgggaattggtgctaccaagtggtatatgatccgcaccatccttcttccaagtgctatgcctggtatccttacaggtgttatcctggcgatcggacgcatcgtaggtgagtctgcagctttactgtttactgcaggaagcggctattaccttccaaagaacctgtttggcaaggtacttgagtcaggtggtacactgactatccagctgtatctgtttatgcagaaggcaaaatacaatgaagctttcggcgtagcagttgttcttctggtgatcgtactggcgatcaacgcactggcaaaatatctgtcccaccggtttaatgtagagacaagataaacgtgaaagacgcgaaagggaaatgagtataatggaaaataaagtaaagatctccacacagaacctgaacctgtactatggagaaaatcatgcactgaaaaatattaatctggacctttatgaaaataagatcactgcatttatcggaccatccggatgtggaaaatctacttatttaaaaacattaaaccgtatgaatgacctggttccaaatgtaaagatcgagggaaccgtgcttcttgacggggaagatatttatgatccgcaggtagacaccacacttcttcgtaaaaaagtgggaatggtgttccagcagccaaatccatttccgatgagtatttatgataatgtggcttacggcccaagaattcacggtatcaagaacaaggcacagttagatgagatcgtagagcgcagtttaaagggcgcagctttatgggatgaggtttctgaccgtttaaagaaatctgcactgggactttccggtggtcagcagcagcgtctttgtattgcaagagcgctggcagtagagccggaggttctgttaatggatgagcctacatctgcactggacccgatttctaccttaaagatcgaggacctgatggacgatctgaagagcaagtatacggttgctattgttacccacaacatgcagcaggcaacccgtattgcagattatacagcatttttcctggtaggcgaggtagtggaatatgctaccacagatgaactgtttaccatgccaaaggacaagagaacggaagattatattaccggacgttttggttgatggaatgtgatcctacggtaaaatgtgagaatgtagagttgcgaaaatgttggaaaagcaacggaaaggggcataagggatgcgcattacttatgaacatgaattagaggagttgaataaatgcctgcgtgatatggccatgatggtggaaaaagccattgagcagactttcgtggcatttgaagaccagaattataccatggcagaggatgttattaaaggagaccggaatgtaaatgacatggaacgtgccattgagtcccgttgtctgtccctgatccttcgccagcagccggtagcaagggatctgcgccagatctccactgctcttaaggtggtaacggatctggagcgtattggagatcatgcatctgatattgcggagctgatcctgcggatcaagagtgatcatgcataccacattgtacagcat

SEQ ID NO: 3527 - DNA, 67256 bp, Unknown
  gut microbiota DNA sequence
cactgaaaaagaagtccgactacaggttcatccccgctcacgcggggaatacactaaaaaaagccttattttatctcactttttccaacacccattttcacatttcatttaacttctgatataactgataagtaagataacagtccgtcaatgccctatgtgcatttgaaacttcatatcccagatgcttcataagtgcttccaactggtaacttctcaccccctttatttttctccgcgacaatgccaatgtatctttggaagcagttcccagttgcatttctattcccagtttccgacaggcaatgcggatgaaattataatcaaacataacattatgtcctataataactctgtttccggcaaattcaaacaatttattaagtacttcgtccagtggtctcccctgactttgcaattcctgttctgtaatgcctgtcagtttttgtatctctattggaatttcaccttttatctggataagcatagaaaattcttctgtgacagtgtctgcctctatttttaacgcaccgacttctattatctcatccttttccggtgatgttcctgttgtttctatatcgagtaccacaaaaccttcctgaaactttttcctggcacgggctttggccattctgtctgccatgtatagccgctccgcccggctttttgctcccgatattcccttatcttctttttccgacatcttagatgcccttgcggacggaagcggccttctcatcagctttattccatcaagttcaaccggctcccaggttgtattatgcacacgaaaatccattttctgttctcccggtgcactaaaaaccatggttgcctgtcctgactttatattttcacaaatacgctgccagacttcttcccttaccctgctgctcacatttccaacgaaaaccccggtgttgatctcacacagccatttagataggtccccccggacttttggcggacagtcagacagcatgatcacgatcattcccattcctcctgtccataggaacatccattcctgactgttccttctttatcgtcccataaataaacagcttctactgcatcttcctttttttcatcctctgcctgaaacagccatcgaatgtctttcaccatacgttccagtatatgtttttctgtcatcacatctctgacttttctgcggacgatccccggaaggtcttccggttcttctgacgccacctggaaagcaacagggataactacctctgatttatacagatccgcaatatcatatacaaaagaacagtcatgtcccacatggataaaaccaagtcccggtgacaggccaagcgcaaaaatcactgcatgggccaatccgtacagacatgcacagcctgctgacaatgcctgatttaccggatctcctgtttcaaaatgctccggatcataatctcttccgttccattttacatcatattccttggcatatttacgataaacagatcttactctgcttccttcccttccacgcagctgctgaagtgtcattttagaagaattttcctctggaaaacgcagctgatacatctttcttacgatcataagatgttttctctggttacttacacactctgcctgtcggatcagaaaagcggacctgtgagtaagaggacgtccgcctgcatagtacctgacaccatgttctccgatccagaccacactgacaccggcatctccgatcagctccattgcacgatggctcactgttgtccccgggcctaaaagcagtactgaaatagatgctgcaggaacatggatgataccctgatcatccgtaactgtgattgcactgtcctgacggtttaatttacaatgttcaaaatacagaaacgtcattctgtctctgatctgaggcagtgcctgtaactcaggacggatcattcccggcatttcgctcatatgtttctccttatttggcagtttactgcaaaagaaaactcaaaaagctacctcattcgcgaacttatatatgaacaattatatatgaacaatggtaagcaatcccattccataagcttttccacgcccgataccggctaccaaaagctctttgaatttttcttcatcacaaaccttcaaaattccctcatatgtcacgcctttaatactgaccttgttctttccctgttccttcccttttctgaaaatatgccagtctctctcaacgatctgaaaattttccggcagaagttcaaagccatgtttttgtgctctgtcaagaagccattcttcctggtacttaagagaacaatgagcttttacttttccccgttctccaggcgtgcttgccacacttcttgtaggatttgccaccagtttaaaatgccaccaggtatcattttttacccgttccagaagtggtgtgtaatctttcgtctgataggcattctcgtcatcagggaaaccatacctgcgcactccaatgctaagatccggcctgtccgggcttaatatcaacagatacagcctgtctcccagatattcaagtctccataaatttctctttctttctcccgaaaatccactttcaacaagtccatggatcttttcctgtgagcctaaaaggcgtatggtatccatattttttgtatttaattccattctggtcaaatacatatatttttatcacctcacaattctcccatggcatcatgctctcttgcaatatctggatttttgcctgcagtcattttgtctgaaattaccctatctgatacgttccattccgtccgtttcatccttctgtaaccataccttctctgatacggatcaaaagactctgccttatcttttaccatgccgcctgtaggatcatctggcgcacattcaataaacattggaagttttaaaggcattttttcctttttccattcaggtccctgccatggttcctcttctaatgctgtttctaatggcagatcccgtattcctaaaaccataccagcttccggcggacaggatcttcttcccagaaaaaggggaaatgccggatgtttcagggcatattccaatttctgtaaaaatcctttatcctcgcactctaatccaaccaaaaatatagcatctgacagataatatctggtggttatataggaatttttctcactatgggctgtatgaaaatcctttaaaagtcttccttcctgatccgtcctgactcccagtctcagctggtttaaactgctgatgtcttcgtttctttgaattcccaaagctgctgccaacagtcctgtcactccactttttgaaggtgcattttccgtccggcgaacttcaaattttgaatcaatcccccatgactggacaggtcctgccaagcgaagtaacaatgtactcattcttctcctccatcatctaactgtgcctggatctctgtctttacgctttccaacagctgttttaaagacataacctctgcggctccttccagctgatcaccaatgccaaatgccttttccggttcatctgcataattatcatatactttcttcgcatatgcagtcatagcttccacagacttatctacatagccgcagttgcttaagatcggacgctcaaatgccccacaaagatttaacggctggtcctttcttactgtaatgtatactgcatccggcaatgtacggtttgcaaaggtattctgttttcctgtaggcatagagcagataaatgcctttataaatccttctacaacctctgccgtatcttttccaagatggcggtacagttccattacatttaccgttgcatagcgatacatggtaaatgagttaaattccacggttccaagatgacctgcacctgcattgtcttcctgtgagcagtcatctactgccgtaaaataatcatattcgttgtggatcgtatgggtagaaatactgtgtgcaacctgtgctgccgcatcataatttaaagaaggatcacttgccaccattcttccaaacaacgccatgtcataggaaggctctttctgcattgcttccttgtatgcctttttatctgtatttccggataccaccagctgggccagcgccttagcctgtcctttgctcataaagagaagggcatcactttctccctttttatcattgatcttgatgccggcatttttaagagcctctgctgccttcttttctgcatcagcttcatccggagcctgtaaacggatctccttcgctaccatttcaatcacttttttcgttctgcttcctatgttctgctcatggaacaactgggaaaaatactctctcatagcctttttccatgcctgtgaagaaactctggctctcgtagtacctccatatactgctgttttaggacttcctgtatcatctctgtttatacagcttggcggaactgtctgtaccacatgcagatccacatataatcttttttcatccattttccttttcctcctcattttctgcttttacattacagtatctgtaaaaatctcgtccccattttaaccggatctccggaattttttccaaatcctgatacagataaaaatccactgctaactgcacataatccagacggatctccttctgcctgaataactgcaccattcccttcatatgccatgctaattccgtcagatcggatgatacagctgctgcattaaaccttctgcgtactgcttttaatgactccggatcttgtgctgccatttctcctgctgctctgccaaagccaattcccctttggtgggcattttcatctttaagagaacgactttgctgatggatcgcatacagtgtaaatgccgtatataatgccagttctgcccgcccaggtgtatttcctctgcctattaattcctctggcagatcttcaaataaaatcccccaaagttccggatctgcacctggtacttttccaacacctttacgcattttagccagatatgccttggttccgctctcatctgggttttctcttaatacacggagcttcttttccgcaaatcctttcatctgttcaatcggattgctattttccatcctcttcacctcctgtcagtgataaattttatgtagttttccaagaaaccagttataagcttccggtgaagcatagtacacatcatctttcgttcttcccgcaaaggcagcttctcctgcatttgaaaccatttcttctcccagttcttttccaaccttttgaatgatctcatctaattttttacaagtttttgatatatcatctgtttctggtaaaatttccataagccatcgtctaaaaggctggtcgatccggtcatagaacaattcctttgcatagacaatatctgcatctctgccttctgccctggcaagatttccttccagcatcccaatagccccagctacctcttcacatttattgatctcgtctaagatcctgctctgccatggacgactcatctgtaaaagcagttcaccctgaaaagccagtgaatcactgaatgtatcattcacaaaaaaatctttatctccatattgtacagaagcaatcctaaaacggatcggtcttattttccattgcatttccgttgctatggtatcataccagctgacaactcccggctttcgcacattggatcccgattctacaaatatgcttccaaaatcccgccacatttgtctggaaggatcatgtctgcgtggtgtgaaaaattttcgatccttttctttcacttctctccacacagtcatctgctctgcatatgccaggtttttgtcaaagaaatctcctcccagcaggtaatatccaaccaccttattatgatctcgttttaacagaagccgccttgactgcaaagtaagaagttctgccaaattatcaggaactgcaatttcctgcctttcttttttagatggttcccgctcccatatcggcttgtcctctccctcccaaagacttctcccgtcttttaaaagggtaagatttaacatgagtgtctgaaaaaggttatctccaactgcagcgatcaatcccaactttcccggccagcctactcctggagaaggaagaccttttccttttggctttgcagaagtatcatcataagcatttacatataaaagccatctggctgctgctgcatattccatttcctgctttttgatcccattacacaatggaaaaagacgtaccttgtttccactttctgaaagctctccatttaattttgcaaccgtatactctgttcctacagctgcttctggtatctgccaaaaaggatattgatcatggaacagccagaagcgttcatgatatttctccagatatgtacggatcacatcttctttaaaatatcctttttcccataaggctctccatctttttctggcttgtgtgggcgtatcaatcacattattctgcccattttcatccatttttgaaaagaccgtgtgcaataccgccagaagcaaacgcaaaacagccatatcctgttctggtgtatccccgcataaatcccggtattcatgtgcatggatcattgcctctggaagagaaaccagttcttctgaacagtcatcttttaatacccgtatccacgcttcttctaataaattaaactccggcgttttcattttttcttgtcctcctttctgctggataatcctgttttactgtcgtaatgtaaatgatgtttgtttaattctgcacataagttttcgtccaataaaagtaccagctcttcacgaagtttcggagcatattgccactgggcaaaatactgatctgtgtcatctctcaattttttcaataccggtttataattatattcatttgaaaatatagatgacagtcgtaacttttgttttaatatttccttcgtttcttcttccgatggaatattatccgccgaaatacgctttcctccatactgccacggcagaaaacagatatcatctcccttttttcgcaaaacaagtacttcaatagatggtgatcccgcacgcacggatgcaagtgctgaagcatctgttaattccggatcaccttcagacatccatgttgcaatactgtcaaattccggatttgtctcatcttcgcatgcgggttcacctactaatgatctttctgcttccttcttcaatttttttaaattcgtgtcatatctatgccataattcatttttctcacactcttccggctctgcatacactttctgaacataaacaggaatatcatctggaagacaaaactgttctggaagtttgtccaaagtccgttgaagcagccattcatcataaacagcccttgtttctgtcaaaacatagcatttagccagctgcagacagaatggtcttattcttcccccatgacgatgttcgcgtcctattctctgaagcaacaagtccataggacaaagatctgtaatcattacatcaaaatcaatatcaagggactgttccaacacctgtgttccaactatgatcagtttatttcgctgttcagaggtagaattttttcctgcacgttttaaaatttctctttcaatctctgcacgatccgatataataaactgtgaatgcatctggatcatttcacattcaggaaaacattcaacaatcttttgtgcaaaatcctgtgctcttgcaactgtatttaaaatgataccggcacagcctccatccttcaaagaatttttcaggatctccatgcattcctcatctttaatacgaatgacctgaacaatctctttcttaccatctaaacgcatctgcttctggcagacctgcttcccatctgtccatgtaaaaagcggatatcctgttgcattacaccagtctgcacttgcattcatgttcctcttattcaaataagcctgtattaaattaaatctatatttttgaggtaatgtagctgacaaaacgatcactggtacatggtacgctcccaaccagtttaaaatccgctccaaaaatgtcatcatgtacgaatcgtatgaatgtacctcgtcgataatgaccactttccccgccaatcccagatgccgtaacattacgtgtctctgatttaatgcggccatcaggagctggtcaatagttccaatcacaaaatcaactaacagtgccactttcctgccttcaaaccagctgtgaaccaccagattgttttcttcatcttcacctactgacaaagctgaaccttttatcaactgctggtaatcttcatttaacgcaaccgctccgtgtgccagacgtatgccaagttttacattttctgactgctgttctgcccatttcatcagtcttggaaaaagtccgtttgccgtagcctgtgtaggaagcccgaagaaaattccaccgcttcctgctttttgccctagaatttccgccattgccaaagctgcttctgtctttccaactcccatctgggcttccagaataaaaattcccggttctatggtgttttgcgctatttccattgctgtatgctgcacttctcttggcaaaaatccgaacctctcttcaaaaagtgcatcatccattccccaatcattttcccctgggatccagaattccgggaaattcagtctttcaatcgcattgttcactcttttgggatagtctgtatcctttcccagacagtcagtctttatcagcggaaaataatatgtattagaagcgatccagtccgccatgatcaaaagccccgtaaggatcacctgcgcttccatactgatatccggaagttcttctacactggaaaatccacttttttcaagtgctgtatccagccattctttccatatagcttcccacttgcctctttgttgtccaaaaaatacatctttaccatagttttctattttttcttctatctcatccgaacactcatcgggtgtcttaccatgatgggaaccaacaattaccgaaattccgattggtaccccatactttctcaaaatgccttctccacacaaagaatgagatatcctattagtcaattttttcgggtcaataagttttattccttcctggatgattgcctcacggattattttcactccctcagagatgtttgattgaaatacatacgtcattttagccgtatcatggcaatatgcaagaaacaggcataccttcaatcccatctcttcccccatgtctttacagatcacttttatagcggctggcggaacccagttatgataaaggtattccataacgccagccgtatcataagaatgcatccataacggaagccaaagttcattatctgtacggtctgtctttgcgatcatatgattcagaattttcgttctttctttcactcctttttcccccctgtctctcttactatctgactccaatatacctctcttccactcaaaagtcaacgctcactttatttcaatagtatttaatcagttttattttttgtttcataaaaaacagcaacgccataccaatgatctctcaccgatacagcgtcgctgctaatatcatctcacctttatctcatattaatcccacatctaaccattcatcatttcttcttttccctgctatacaccagaaccaaaaggataatgataatgccctgtacaacctgacggcctgcatctgggatgcttacaatggttaagaaatcatccaggatagtcatgataacagcacctgcaatggttcccaggtagccgccttttccacctgtaatggctgttccaccgatgacaactgctgcaatggtctttgtattatagctggttcctacatccaggaagctggttcctgtatatccaaccagaaggaagcctgatacagctgcgatcaccgcagagatcagataaacagagaaagtaacacggcctgtgttgataccggagaagcgggatgcttcttcattgatacctacagaatacagctttctgccgtaaggagtcttatgtaacagtacaatggcgatcactgcaagaactgcccagatcagaacaataccggatacgataccatacatactctgtccgcagatggaacggagcaatggtgctgcatttccctttggtgcaccctttgtatagatcaggaaaataccctgtatcacagttccaacacccagtgtcataataaatggcgggatctttaaccagtaaacaccagttccattgatcaggcctactacgatgcccattacgatcacagctaaaagagccggaagcatggaactgtcacgtcccatcatgatctgggctgcgatcacatttgcaaaggtaatggtatttgcaatagacaggtcaatacctcctgtaaggatcgtaaggttctgtccgattgctgcgatccccataaaggacgcaagtcttaaaatacctgccatatgggtgggattcaaatatcccggagataatatctgagccagtaccagaagaaggatcaggatcaggtaaactacgatctgactgttttctaaatatttactgcacagtttcttcacgattaaacaccttcctttcttctgttaatgtttcttatgcattgcacttaaggacagtgccaggatcaggatcagaccctgacatacaaactggtagaatgacgatacaccaaaaaggtttagcatattattgataatggaaataataaatacgcctgctatggttcccagaggatcacctactgcaccggtcatggcagttccgcctactacagttgctgtaatagcattcattgcgtagttctttccgatcgtcgcgtctgcagagttcatctgggcactgaggaagataccggcagctgcacagagaagacctgccagacagtaagcaatgaattttaccttttttacctttacacctgtggaataagcagcattttcactgccgccaatagctcttaaagcttttccatatggagtctggtttgttaaggttctcacaaggatcaggatcaccaggaataagatcagcggaaccgctccctttaaacctcttgtaagaaatttagaaaatgccttatgtacagaaccgcccggctttggcataagaagcaatgcgcagccatcaaaaattgctgttgttgcaatggttacgataataggagccagatttcctcttgttaccagcactccgtttaaagcaccgcaaaccaatcccaagactactgctgcgatcagcggtaaaataaatccaacaggagattctgtattcatagtcataacacagactacattggccagtgccacgataccgcctaatgacaggtcaataccacctgttaaaatgatcagtgtctgtcctaatgctaccatcaaaagaggaaaagaagtcctgagcaggtttttaaagtttcctatagtgaaaaagtcacggctgaacacacttacaaggagcataagtgcgaccaggaatacatatatgatcaccacatgtccatgtttgttccagaagtttttatttagcttgttcttcatccttctgtctcctcctttgtccgttccttcttcatgcccatgccaaactgcatgatcagctcttctgacagctcttctttctgtaatgtaccggagatcctgccttcatacataacaataacacggctgctcattccgatcacttccatcatgtcgctggaattcatgatcacggctactccctgtgctgccagttcatgcatgatctggtaaaactcacgctttgcctctacatcaatacctctggtaggttcatcaaacaggatcaccttaggctctgttgcaagttcctttccaagtactattttctgctggtttccaccggaaaggctggaaaccggaagctccaagccacctaatttaatagaaaggcgttttaccatatcttccgcaaaactggtttctgctttctgatcgataaatggtccattcattctttttttcatactggaaacagccagattgtgacggttggaaagctccagcataagtccctgtctcttacggtctgcaggaactaaggctacgccgcactggatggcctggcttgcgcttttgatcttttcggtctttccattgactatgatctctcccttagtcagcggataaagtccgctgatggcatttaaaagctccgtctgaccatgtccctgaagacctgcaattccaagaacttctcctttaaatacctggaaacttacatcttttaattttccatcgttatctgtaaggttctttgcctcaaatactactttgctgtaatccggctcacagactggcggcgggaaaatattagtaagagaacggcctaccatcattttgatcagctcatcctcgttcatttccttcatatccctggttcccacataatgaccgtctttaaatacggtaattcggtcacccagttcaaacagctcttccagacggtgggaaatgaaaataatggtcttaccgttatctaggaggttgtggatgatctgatacagctggacaacttctttctttgccagcgcagatgtgggttcatctaagatgatcagttccggatctcttaccaggatctttaaaatctctaccatctgctgttttgcaacaggaagtgtgctgactaaagcgtccggatctacatggatcccatacttatccattgctttttcgatctcttcatggatcttctttttgtctatcattcccagggcatttaccggctcctggttcagatatacgttttcagcaactgtcatctctcctacaagtgtcagttcctggaataccatcgcaattcccattttctgggagtgctccgggcttttaatagtaacctttttgccatggaaataaatctcaccctcatctgcctggtggatgccagccagaatttttaatatggtactctttccggcaccattttcacctgcaagaatgtgtacttcacctttattacaggaaaattctacccggtccagagcggtgatcccagcaaaacgctttgtaatatttgtcattctcagtatctcttctgccacgatagacctcctcctcaacatatccatatgctcccaagattccgggaggacatattctttaaagggctgctgcaagtttctttgcggcagccccttgtttatttcttttattccggattacttgtaaagtttctgaagtgcttcatcatccagctctgttaatacccagaagctgtctggcatatccgggcggtagtaatcctccaggttatcctcagtaactgtttcaatatccataactacgttctttggaacatcttcaccatctaaagccttaattacagtacgaagagcttctgcactggtgtaagttgggttagaaggagcgatgcagcttaagccgttatcgcgattttcataccatgcctttaatgcaccattgttgccttcactggtcataggaaccagatcacgtcctgctgcgatgaaagcatcaattgctccctgtgtcatagcaccgccctgtgaccatacaccatcaatctcaggataagcggaaagcatggactcaacagctgccttgccctgtgcatagtcccaggatgcatttgcagaacctaaaacttcaatatccggatagttcttaaatacttcttcagcaccgccccaacgtaaggagtctgttgctgcaccggcaataccatttaatacaatgatcttgcccttgccatccagtttttcagccagccactcagcaccaatgcgtccaaattctgtttcatcaataccaacagttgctacctgctcgtctgtatcaactacgttatcaaaagatacaaccttaataccagcttctgttgcttcttctacaacaggtgccagagcagttggagatgctgcagtaattacaatagcatctaccttctttatgatcagatcctgcatatcactgatctgcttgttaatatcttcattagagttggtgatataatattcacttacaacgccttctgattttaatttttctgcttcagatacaaattcctgctccatctgggcacgccatgagtttccgatagaatagttgcaaagcgctactacatatcctttaccatctccctttgcttcttcttttttgctttcttcagaagatgcagccgcagctgctgtagttgcctctgctgagcttcctgctgctgtagttgatgtggaagatcctcctgagctgcaagccgccagactcattgccatcattgctgctaaccccattgctactactttttttctcatactgttacctctcctttgatgtgattaatgattttatctcattctgctgcctgcagaaccatatcaatcttaaaaacagcttttaaaaaaacaaccttctggcattttctgccatgatcttttccttggctgattccggaatattcttgcactcctctgttaccagacggatcagctgatttaaagttcctttctttaacattcccggataatcagaagcccacatcatcttatcagcgcctaccttccggtaacattcttcgataatgttcacagatgttttccatggatactcttcctcataatagtccggaactgtagatgtatcgatataaacattttcatattcttttacgatctgaaggactttttcataatttctctttggcatccctgccctgaagcagatatctgcgcccatatggcatattacaaatgtaatatggggataggtcttcgccagcagttccagatccacaatatcttccctgcggaacatatggatgaacattggctgatgatattgttcacaacagtcccatacaggtgcaagttttggatctgcaagccttgttcccggtgcgcactgaaacgtactgtctacttcgatcttcataccaaaaaggatgccttcgtcatagatctgagccagttcctctgctgccgccttacctttcataatatccaccagagctacgccccttaagcggtccggatacttttttacactttctttaaaataataattgtgataaccataaaatggatttggcataagcagtgctttttcgatcccgcaccagtccatataggcgatcaacgcttctgccgtactgcagctgcgttcaaaggaagggggaagaaactggatctccctgttaccaatagtaacttttccctggctggtagatgacattggctgtccctgtgtgataccagctaccttttcataaatgtgagcatgtatgtcgatgactttcataacattgacctttcttttcacatctcttgtgtttttgtacattttttcgtgttttctgatctgttcttagtatagcctgtacatatttttctgtatatgtgatttcatttgaaaatattttgatttcatttgattttattgacgctcttataaaatcatgttttaatgtttacagattaaaatacgtgaataagcaggaggtatttttatgtttaaaattctttcatatcctattaaagacggagatcctacctggccgggaaacccaacctgttctctggaacctcatacttccattgcaaaaggagataccgcaaatacggctactatccatctttttaatcactacggtactcatctggacggccctatgcactttaatccaaatggtatttctctggacaaagttcccgtggaacgtttcttctatcagaaacctcttgtgatcgacgttcctaaaaaagccggtgaaaagatcctgaccgaagatctgatcccttacaaggaccagatcgcacaggcagattttctctttttacgcaccggtttctggaagaaacgcaaaagcgatccttctgtttatgaaaataacggaccggccgttggaagcgctgcagcaacctatttacgtgaaaatttcccaaatctgaaagccattggcctggattttgtttcccttgcttcttacagtgacggaaaagacggcgatctggcccatcagatcatgcttggcatgtaccagcccggctacatctgcattgtagaagatatcaacatggaagaactgccggaaggctttttaaaacaggctgcagctgtcccgctgatcattgtagggatcgacagctgtcctgtcaccatgtgggccgagttttagggaataactctgggaggttcatttatggcttttcttaaaaagaactggtgtttaatgatcattaccacccttttgttcctgttagtctacactatttacaccagctccattccgctgcctgatgtggtgaatcacgttgacgatcacataacagtaggattttcacagattgaaacagataatccctggcggactacccagatcaacagtttccgtgaagcctttggccccagtaatattgaatttatctaccatgagccggaagaatacaccgcaaaatggcagcaggaagacattacaaagctgatccgtgaaaaagtagattatcttgtgatcgttcctgcagatctggatgcccttgttcctgcccttgaaagtgcaaaagaagcaggaatacctgttatccttattgaacaatctgctgatactattgaccgggatctgtatatgtcccggatctcagcggattatctgcgggaaggagcgatctgcgcccagctgctagctgaaaaatatgccggccgctcctgcaacattgtagagatctacggtacggaaagctctccctctgccaaagcccgctccaaaggctttcaccaggctttgaaaaactatccgcagctgcatatcattgacacagaatacggaaattttgaccgtgtaacagcccagaaagccatggaaaatgccctggtaaaaaccagtgactcccacaaaagcgtccaggcagttttcgctcacagcgacgaagacggccttggtgcccttcaggcaatcaaaacagccggtctgtctcccaatgacatttctattgtatccatcaacgggatccaggatgtgtgcaaggcgatcattgcaggggaatatttaggaacggtggaaagcaatccaaaatggggatttattgtagaaaccctgatcaatcagcgggaacggggatacactccatttcctacggtgatcatcccttacaatattattacagaagcaaatgccgtcagctattttcctactgcttattaacggcatattaaaagaaaggcgttttcattattatgaatgatttccacatcaaactctctttcagaaaaaagctcctgctttccttcattgtcctttcctttatcccggtgcttctgatcggtatcactacttacaggctctacaaccgttttattactgacatgacggaaaaatcctctgtagagaccattgatctgatctgtaatgacattgacagtctgctaaatgatacctggcagctatgtgatgcgctgacccgtgatattaagatacaggaaaatctgcgtgtgaaatttaactccgtatccagccagtattccctggatctttccggaagcatggatatggcttccctttccacctaccgcaaagacattttcggagtatatgttttaggtgaaaatggcggccgctataaatccaactattactctttcaaaccggatgatcccagagactccaaatggtaccagaagattaaaaattcccctgaatccatctggttttccccacatgaaggcagttttattgtgcgcagctccattgaagaccgttttatctctgtgggacttccttcttctgacaaggctaccggacggatcaacggcgtgatctgtgcggatataaaagaagatgacctgacaaaaaagatacaggacagtttaaacagcggtgctgtctatcttttagatgctcagggaaatatacttttccaatctggaaataattcccattttccagtttccgtatctgatgaactaaccggtcagatccttcaggctgccaaagacgcagatacccgttctgtggtcatacccaacagggaatatctggtagtaggccgcacattaaatcgttccggctggtgtattgcaggtgtgatcagccgcagatatctggcacaaagtaccaaagagctgaccacgatccttttgctggtccttttgatcattgcattttccgccctgtatatttccctgcgtatctcccagtctgtataccgccccattcagactctctgtactatgatggaggcggtagaagccggggatttttccgttcgttattcggaacctcccgcagatgaacttggacggctgggtaacaattttaaccacatgttaaataagatccaggaactgatcagccagatctatgaagaacagaaaaaactgcgaaattcggaatttaaggcattacaggcacagatacagcctcattttctctacaattccctggactctgtaatctggtttctgcgtatggggaaaaataaagacgcagagaaaatgttaacggagctgtccacattatttaagatctccctgagtaaaggacgggagatcatcaccatcgaagatgaattaaagcatattggaagttacctttttatctccaatatgatctacagcaaaaaattcacttattccattgaatgtgacccgtccctgtatcagtaccagacccccaaactgttactgcagcctctggcagaaaacgccattttacatgccgttccccttccagatgaaaaggtccatattcatgtgagcatccgtgaaaatggagactgcctgcttctttctgtacaggatatcagtaagggcatgtcccctgaaacgctggaaatactgcgaaagcaaataaacgctccccgtcagccggacaagcaggactccggatacggactttacaatgtaaatgaaaggatccgcattttctatggccccgatttcggtctgaacattgattccgatcctgacataggcaccgaaattacactgaaaataccaaaacttgagagaggtgaaccttatgttccaagcaatcctgtgtgatgacaatgaaattatactggaaggactttccagtcagatcaaatggaaggacttaggtattgaactgacagctactgctgccgatggaaatgaagcctgggaactgatccagaaaaacccgccggaccttctgatcaccgatatccgtatgccttatatggatggtctggaactttccaaaaaggcccgggaactaaatcccaacatagtgatcctgatcatcagcgcttacgatgatttccagtatgcccgcactgccatgcacctgcaggcatttgactacattttaaagcctattgatgtagaccagttctgccgtgtccttgaaaatgcagttcttcactgcagccagcttcattatgacaaacgtctcatgatcacagaatacctgcgaagcattgtcacgcaggatgcttctgaccttcctgcaccaagtcctgacctggatctggatcccggctcctactgctgtgctttacatattaccatggacgaagaaagcctgaaaagacgttctaacgacatccgctatgaagaagaacagaaattttcagccttcagtacatcattatgccagcctggatgttaccttttagattccaggcacaacagctacactctggcactgttatccggttccaagctggagctgatcactttgaggaaaatactcattgattctgtccggaagatctttccttacgacggtcagaactgtgatgtgatcattgcctccggaaacctgtgccacaatcttaaccgtttaaacgaaagtatgaaaagcgtggcagaagcattaaagctgcattttatcaaaggcaccaactctgatattttctatgaggaagtagtttcctatattggaaaagaggctgatccttctcccaagcttcccctttccggcaccaccctgatctccctgatcaaaaaacaggataaaaagggactggaacgggaacttttacagctgaaagaaaaccttcgtcagtgcggcagggaaagctacctgtatatgaccttttccatcagccgtctgtatacagaccttgcaagtgaacttggctcatcgggaattgaacttcaggatgtatttgataatcctatggaagaatttaaaaaagtagcttccagcaccaccttagaggaaagtattgaaaacctgaaacagaatctttttaagattgttgacagtttaaatgcaagaaaaagcaaatacggcaagcaggtggaacaggctatcgaccatattaaacatcattattccgagtctactctttccattgaagatgtagcccggaccgtatgcttaagcacttcctatttcagcaccatctttaaaaatgaaaccgggatcactttcacagattacctgatcaagatccgcatggaacgggcgaaaaacctgttggaaaacacacacatgaaaatgtacgagatctcctctatgaccggttatgaaaatgccgcttattttagcgctgcttttaaaaggtattttgggaaatcaccgtcggatgtgcaaaatcaccgatgatagaacagacattaaaaagtgctgcgactatgaaaaccgcagcacttttattatgcacacattacatttctatcttcttaagcacttctgccttacaaacctttcctgtggtatttttcggcagttcttcccagatatatactttctttggtattttataaccggcgatcttacctctgcaaaaggttcggatctcttccggtgtcagtttgctgcccggtcttaatactacaactgcctggacagattcaccccagtagtcatccggaactccaagaacacaaacttccgcaatgtcttctctcatccgcagaacattttctacttccagcgggaaaatattttcaccgccggatatgatcatatcgctcttgcgtccgctgatataaagataaccgttctcatccagatagcccatatcacgggtatgataccagccatctaccataacttcctttgtctcatccggcattttataataatctttcatcatgccaggacctgtcactacaatttcgccggtttctccgggagcacattcagaaccatcatctgcgatgatctttactttatggtcttcaatgggacgtcctacagaattcaggtatcgcatattgtccttaatatgctcttcttctgtaagcatagtgacaatagaacccatttctgtcatgccataggactgctggaagccgcagttaaaatgctttaacgcacgtttgatcagctccggcggcatgggacaggtggaataactgatggtatggatactgctcaggtcatagcggtcaaaatccggctggttaagcaaagcagtcagtacagtaggaatagcgcttaacctggtaacatgatgcttttcaatgctctttaaatattcctgtggtgaaaacttcgggaacagcacaatggttccgccgcaggcaaaaatggaataaggaccaatacttgctgaatggaataactggctcatcagttggaacaccgtatctttgtcaaagccaagggaatgtacacaggtagtcagttcccgcatatactgtccctttgtataccgaacagtctttggcataccggtagtaccgcttgtatgcagatgcattaaaacatcttcatcctcacgctcaataaactgttctaaaggctctacaccttcaagaacctctttgatacagtccatatccacacactgacacatttccttcgtcagctctcccatttcctttcgaatactctcatctttggaacggaaaaaggtcaattttacttcgttaaactgcagaaggtggtgcagctccggagcagcaaggcgccagttgatatttactggcaccccgcctgccataatgatacccagaacagtctcaatatagtctacatggttctgggagatcactgccactttatcctgaggttttatctctttttccaatacaaaaccggcaattctttttgcattgtcaaagatctggccatatgtccttgtatcttctcccatgataatggcggtcttttccggatactgctcttttcctgttttaaatatatcgatcaaggaatgaaactgcccttccatcatttatccccttctttacatttcctcatccagatgtttaaactgggtggtatcgatctgaacagctgccttcttttcttccatggccttgatctgttcatctgtataaccgatctcttttaaaacctcttctgtgtgctcgcctaacatagggccccgcttccaggtcgggatacccatacggtcacttcgcatagccgggcgcaccagaatggattttccgccatttggacaggttacttcatggatatattcattttcccatgcctgctcactgtgctccatatctttgtaatgagccagcttatcatttacaatatctgcctctgtaagcagcttgcaccactcatctgcagtcttggttgcatagatttcttcaaaacgtttcatcagatatttacgcacttccggatctctctgacgcagggaggtgttatatcttgggtctgttcccagctccggaacacctaatacattacacagcaccggccactgctcttcgatctttaaaatagtagtcatgacccactggttgtcctttgtcctgaaaggagcgcctgtaggtgcgcttacctctctggtctttggatactggcatccatagcgttcttcagtagcaactgccatgatatggaagcaccagagtgcagttccgtaaagagaagagcttacacggtcgccctttcctgtctgggtgcgcttataaagagcggctgtaatggcatagcacagacccattgcagttacgatatcaccaggaccagcagaactgtatacaggataacttccaggtccttctaccatcatatctgcgttaaaaccactgcttgcccagaatgcaacggtatcaaatccaggattatctttcttcggtcccttttcaccaaaaccggaaatattcgcctcgatcagtctcggatatttatcctttaaggagtcgtaatccagtcccagtttctttaatgcttttacacgggtattggtcaggaatacatctgcctcagctaaaaggcgatgcatggcttccatgccctccggtgtctttaaatttaatacaatgcctctttttccggcattcaggttatcaaataaggggttctcatccatagtgcatggtacaagaaatgtttttgggaaattacggaacatatctccgctttcagcttctactttaataactgtagcaccccagtctgctaacattcttccacaggagcctgctgccaccattgtagaaagttccagtactttaaccccttccaaaggtctgtaatttgtctcgtctgccattattatttttagtcccttctgtatttattgccttctcttctatcccttttgatcattaataaatagaagcctttaatccgccgatcacctcttctgcttctgctaccatgtcatccattaactgctgtaccggcttaatatcatcgatcaggcccattgccggtcctaatgcataaataccaccgtcaatatcgccattcttatagcatttcttgctcagtcttcctgcaataaccgtcatcaattcttccagagtggttcctctcttttccatttccagagtcagctttgctgccatgttgtttgcaacacgggctgcattgtgaatggatttctggataataactgtatctttttctgtatgctctaacagccattccttgtggttatcagagatcgggcactccgtggttgctacaaaacgtgttcccaaaacaacgccctgtgcgcctaatgccagtgctgctgccaggccttttccatctgcaacgccgcctgctgccagcaccggaacgccatattctgcgcaaaccttagctgccttgttggcaataacgaaagtaccgattccatccatacttggatgtcctgctacctcataacctgcaatggtaatcacatcagcgccctttcttgccatgctggctgccacctttgcatttgggctcttgtggatgatcttaatacctgcttctttgcaggctggcataaattccacaggggaagcacctgcaaactcaatagctgcaacgccttcttttgcacatacatcaatatacttaaagatctcttcgccctttgtcagatccggaaccagggaaatatttacgatgaaaggcttattgttggtgaattccttcatcttgatcacatcttcgtggaattcgtctacacctggataacaggtaatgttaatggttcccataccgcctgcattgcagactaaagaagcaaattcagcaattcctaaatgctgcataccgccctggacgattggtttctcaattccaaacatttctgtgaattttgttttgatcataacgtaacctcctgttatacatgttctgttatctattgcttttcccgggtttctcacccatacttttcattttcagcatacaaaaaatacactgaccgtatgataatactttaacagattaaaccttcttaatctatgtaggaatgcacgaagaacattccccttaccacctgttattttcgtaggattatccataatttgtaccgtgcaatctgcatgcttttgccttatacttagagcagaaatgatttctcactggactgatttggtttgctctggtgaaaaatataacaggaggtatttttatgtatcagtatgttaaaacttacatcgaaaatggtgcaggttatatcatcctcaatgaccccaaaaagttaaatgccttaagccagcctatggcagcggagctttccgaagttttagagcagttccgctttgacccacagatccgcgtgatcgtgctccggggcgaaggcggcaggttctgtgcaggcggtgacattacttctatgaagaagcgtgtggactgttatgcagccggtatccctgctccaacccagactaagaccaacatggctaatttcaaccacctagtcctttacatccgccagattgaaaagcctgtagttgcctggatcgaaggtgcctgcgcaggcggcggaatgagccttgccatggcctgtgactttgccattgcagaggaaaacacaaaaatgtcctttgccttttcttctattggactggcaccggatatgggaagttccgttcttcttacccgccgcgttggtcctgcaagagctgccgatctttttatgacaggcagacgttttacaggaaaagaagcagctgatatgggcatcatcacccgtgctgtaccagctgaagaactggaagaaaatgtaaaaaaacagattactgccctggcaaacggacctactctttcctatgctgagatcaaaggcggcatcaaccgcatcatgtacccggatcttcaccaatgcatgaatctggaagcggattatgcagaccgtctgacccattctgccgaccatgcagaagcggtaaatgcatttttagagaagagaaagcctgtattccaagggaaataatgtatcgtaaactcacgtctttgcgttggcacacttatctgcctgctgacgcaggtgagaccttcaccagcacactggacctgttctttgcaggtccctttttatttgcaaaacctgagttagcgaaacataaaaactcccggaaaacgcttttatctagcattttccgggagttttatatacatgccgtatgcggaaggtacggcatgttgtggggatttcattttacgtttctatgtatccttaacctgtgcttacagatagaaacctgcggagatcataacagctgcgaagcatgccataacgatcggcagtaccagagacaggataaagttgtttatgtaagcctgtctgtgggtcagcttggttgtagacagcatagtgatgatacctgcgctgtgcggcagtgtatccagaccaatggaagacattgcaaccagtcggtgtaactgaggtccaggaattcctgttgcgataaaacggtcagcaaagttctgaagggcgatgttctcaccagaagaagcagaaccgcagataccggaacaaatattaactactaatacgatcataaatgggctggttccaaagttatttaagctgccaacaatagtctggaatccaggaacagctgctacaacaccaccaaagcctgatgcacagcaaacagtgatcagaggcatgatagcctgtggcatagcgccggagaagatcttctttaaatcctgcttgcgtggatcatataacagccatgcaactacgcagccgctgcaaagagcgatcactgcactctgctttaatacatttaatacaacgataacaacgatcattggaagtaagcactgccataatggtttttcgttctcaacgcttgcttctactaactgctctttatcgatcagttcgccagttgggaagaatccttcacccttcttgttagtacgcttgcactgccaccagatatacagggaaccaatagcaaatgtaataatggagcttaagataccaagaacaggtgctgacatggtagttgttccaaaatattgcattgggatgatgttctgaatctgcggggaaccaggaagcataccgatggtcactgtggaagaaccaagacaggagcaggagtacatccaccagggaatgttcagatccttaaacagtgaacgggcaattgctaccaagatgaatactactacgaatacgttaacgccgccgtaggttaagatcagctggatcagcggaagtaccataactgccagccaacgctgcatatccggattttttgctttttttgcaatacgtgcaaccttaactgcaatagaaggtgctgcaccggaatcgcccatgaaacgtgcaaataatgcactgaacaggaagatcaggaaatatccctgcatgaatccaactgtctttggcataaatgcctcagttaatgctacgaatggattcattcctccaaatactgctactaccatagccgaagcaatggcaacgatgatcgtgttgtaacccatgtaagccaacaggatgaacaacgcaagtccgatcacaatacccagtaaactaatcatatcattacccctctcgtttatttatcgtttcaggtaccacaccccctgttcttccgcataaagcaggtcttgaaacgatttattatgatgtaactgactatgacataataataacaaactcagattaaaccatctatgtcactacgcacaaaaatcgaaatttgattttcgttattttctggtcaaaccaacctgttaaccaaataacaggttttattaacgcagtaaagacttggcaataaccactctctggatctcgttggttccctcaataatacggtttacacgggaatcacggtataacttggagatcagatattcatcgcaaagaccatatccgccaaagatctgtaaagcatcatctgtgatcttgccgtatgcttccgttacaaagcattttgcaatagaagcctctttgttgcatggcttgccctggtcaagaagcatggtagcattgtataccagtccgcggccggcctggatcagcatttccatgttggcaatcttttcctggatcatctgttttgcgcagattggttttccaaaagcaattctttccttggaatactggattgccaggtctcttgctaactggcatgcgccaaggctggaagccgcaatgatcggtctggaagcggtaagaaccttcatagcgttggcaaagccgccttcttctgttccgatcaggttaaatgcagggatctctacgttatcaaaaataacctctgctgtattggaaagacgcataccgatcttttcaatcttctttcctacggtaacacctggacggtctttttctacaatgaatgtagccagtcctttagagcctttggaaggatctaaggttgccactaccaggaatacacttgctaaagaagcattggtaatgaacatttttgttccgttaataacgtaactatcccctttgcggacagccgtggtacggacagcagcactgtcagaacctgcatcaggctctgtcaggcagaaagagcttaaatatcccttctggagcaggccggaataatactgcttctgctcttcatttcctgctgccataacgatctttccgcccatgctggttacattgaacatacccataaaggtactttcaacttttgcgccttcctcgatcatcatagctgtagttgtggtgtccagtcccatgccgccgtactcttccggtacctgcagcatgtgcagtcccatttcaataccctgttctatgatctcctgtggataatggccttctttttcccattccagcacatgcggcttgatctctttggtcataaagtcacggatcagctctaccaggctctgctgctcttctgttacattaaataatccattctgcatatggttgatctccttacttttaatctccggtgaaaactatattttcactgttctgaaaactataaattctggtgtggccagcgctcttccagctctttgatcttttcttcgctatagcctaattccttgaacaactccacattctgctcgcccagtaatggcgctctcttaaactcaggcgctgtctttgacatgctgcagttgccggttcttgtatagaaggtcttcatcttcatatccggcatagtaggtgcttctgaaatccagccattttcacggaaatcttcgtttgaccatgcctggtactcatcctgaaccttgcagcatgggataccggcagcatctaaagctgcaagtgcctcgtcctgtccggagaaactgttggtcagccattcgttaaataatgggatcagaaccttctgatgacgtgctctgtcaccaacctcctgatattcaggatcttccttccactcaggtcttcccatcaggtcacataagctgtcccagatacgctttccggaagctgccataacgatatcaccgtccttgcagtggaatactccatatggacacatagtaggatgatgatttccctgacgtttactcatgcgctctttgcccagattacagtggatcagaggtgtgttcatatataacagggaacgaagtaaggatacatctacatactggccttcccctgtatctttccagtgatataaagcagtcatggtgcttgcaaacatatttaaagcaccaaccatatctcctaacgggatgccgcttttctggggtgctccgtctgcttcacctgtaacactcatgataccggacattgcctgcgcgataatgtcatatcctggcttggaaataagtcgtcctgtctgtccataagtggtaagggaaacatataccatatccggtttgaccttgcatacactttcataatccagaccaaatttcttcatggttccgggacggaaattctctaagatcacctgtgcagtagggatcagtttctttaccagttccagtccttccggatccttcatatccactgccagtgatttctttccacggttgaaccagcagtatgtaaggctttcaccgtctaccataggcggaaactttctgccgtcttctcctcttcccggacgttcaattttaataacttctgcgccgtaatcagctaacattgctgctgcagtaggtcctgctgccattgttgtaaaatccagaacgcggattccttccagtgcttttcccatatttatcttcttcctttccaaattactttccagttattttcataacaggcttattatcttataaaccaaggctgtttaaacgttttaaaccttcctctgcctctgccataatggagtcaatgatctccttgcagctttctacctcatggatcaggccagcagccggtccgacagcgaacataccgccatctacatttccgtctgcataagcggctttgccaagttttcctgatataacaggcatcagttcctgtaaggtggctccctttgcctctaactccaggcactttcttgctgcttcattatttgcaacgcggaccatgtttttaatagatttctggcaaagaacagtctggttctcatttgcatttacgatccagtttttatggttttcagagatccagcattccttacttgctacaaaacgtgttcccattacaacaccttcgcatccaaggcttaatgctgccagtaagcctctgccatctgcaataccgcctgctgccagtacaggaacctttacttctcttgctgtgcggtttgccagtaccatagttcccacaccatctgtatgaggatgtcctgctacctcaaagccagccatggtaataagatcagcacccatgctctctgctttctttgcatgctttacacaagctgctttatggatccattttacctgatccttatgggcatttaatacatctgccagctcctgagggcttgcgcctgctgtttctactgctgtgactccttcttccaggatcaccttaacctggtcaaaaagctcctgtcccggatggagacttgggatcagggaaatatttactgcaaatggtttatctgtttttgcctttacttctttgatggcctttcttaaatcttccggatccggataaatagttacattgatggttccaagaccgcctgcttctgatacggcagctgccagttcaggaactcccagatgctgcattcccccctgcatgatcggatatttaatccctaaaagttctgtcattcttgttttcattgatctgcctctcctttactttataaaatacacacggtttccccgcatgaatgcattgcttgttattaaaataacatttgaaccgctgtaaagatacagcggttcatacaatttttttataagtgctttcttaaaagtaatggttatattaaccaaaagcttttaagagtgctgttttacggctccagcttcttttaaatgaacgatctcatcctctgaacagccaagctgttttaagatctcatctgtgtgttctcctggctttggcccccgtcccgggccggtttctcccacacttctcatgtgaaccggcggcatggacatcataaatggatggccgctttcatagatatactcctttacaaagccatttgccacagcctgaggatctgttgccagctccctgtaatggcgcatacggtcaaagacgatatccctttcttttagtcttgccgcaatctcattatagttaaaatgactaaaggcttcctccagaagcgggatcagctgggccctgtttttagagatcagcgcagcattggcaaaccgctcatcttctgccagctccggcacatttaacgcctctgctaacggtttccagtagcggtcatgctgggtaacagccaggtggagccattctccgtccttgcatttataaaaagtataaagagcccccatttccgatctctttttaggataatgataaccatactgctcaaaagcagacatcgtaccgcaaagccatactgcattgccaaaaagagaaatttctacaaaatcgccttttcctgtacgcaccctgtcaaaaagcgctgcacagataccgccaaaaagcgcagctcctgtagctccatctccgatacagcccggggcgcttgcaggatagccgctgggttctgccatatctgccaacattccggatcttgagaaaaaggcaacaccgtcatatcccggtgcatccacatccgggcctgtctgtccgtatcctgttaccaggccatagatcagctttgggaaacggtcctttaacgactcataatcaagaccggatcttaccagggattttaaacggttattggtaataaatacatccgcttcatctaaaagatggaacaaaatctctttcccttccggtgtcttggtgttcaactggatatcctttttgcccagattgtaaatgtcaaaaagaggattttcctcatctgtaatgggaagtccacagttggcaccgtaaaaacgccatggatcacctgcagtgctttccacgcggatcacatccgctcccatttctgccatcattcttcctgctgtcggcgctgccacaaaactggccagttccaccactttcactccttctaatggtttgtgtgcgctcatgatcttttcctcctgatcctaaaaatgttctcctgggatgtttctgtgcctgatcttatacgaagatcaccggtcagacgatccccattttaatacataaaatagatacaaacaaagtaataaagcctggtatataagttgacatcatatacattttcagacattctgcatagggcatgcaaagcactgccgctgcattgggtattcccgcattatgaggcgcaatactggtaaaagaagtaagcatcatcatgcggtgggcattgcctgcactaagtcctgccagtgtgtactgatctaacatatgggaaccgaaagccgggatcggtgctgctacagatgccatgataaaggctgctaaaagtcccataagacttccgctcatcagatgaggcagagcagacagcatgttctgaaaataggtaaaaccttctatgttttttaccactgcgccaatggcataggtagcggaaacacttaaaatggggccataggcagcagtgatgccctgtgaaaggcttgtctttagctttggcagcaggttcttatgtcctgtaataacagtaaggatgcagcctgcaaataatgcctttactacatatacctgaaatccggcactcagcaccaacactacagctaaaggaaggatacttggaagcagtcccggaagacagtcttccgataaaccttcatccagattggccatacggattccttctcccgatggcaggaacgcttccccttttttctgtgttatttttaacatggtccataaaaacaccagggataccgcccagaatgtgaccactgcaacaatggaaagcttccagcccgccatggtggttgtgccgcagatatccgtagcatatacattgcccgcctgaatagaaccggccagataagcggcgcttacagtctgtgccccggcgcagcagtacagccgccagggggtatctgtttcctcataaatggtctttgcaataggtagtaccgtaaacaccaccacaaaaccggaaattcccacataacataagataaaatacaaaaccggaactaaaagcacacagaaaaacttctggttgtttttgctttttttgatcagccctgataaggacaaggcgatcttttttgcatttcccccatcactcatcagctttcccataagggcacttaagaaaaacaggaggaaatagctttgtaaaaaacctgccagtcccggcaaataaaattcttttaagccgtctaaaatactgatcccggaaaacacaaacataagacagctgctggcaactgctgacaagatcaggttaaaacctttaaatgccagcactacaaacagtaaaagccccaggatcattcctatgaagctgatcataggctgttttcctttttgtctttttcaaggtctgcctcatttggctttctgccttccatggctgccatacgggctgcgctgactcccggaaccttcattgcaaaggtatcttccattaccccgtaatcccagtatccggctctgccgatcaggcgcagtttcctgtaatccagctttccgtttggaaggatgatctcatctgccacatggatctccactacttttccaatgatcagatccacagtaccttttcctcctgccatagtcccgggaatacggatggtctgcatgtattcacactcaaactggatgggtgattctgctactcgctttgctgccactcttacagactctgccttgtggagtccggctttttcaaattcatcctcttccggcgcaaaaccgctggctgtaatgttcatctgctccttcagatcatacggaactgcgttatatacaaagcagcctgtagactcaatattgtttacagtatccttgcggtgtacatgatccggctcgtctcccccctggttaatagcgatcatgaccataggcggatcgtaggaaaggttctggaactggctgaaaggcgccagattatcaattccgtccctgcttacagtggagatccagccaatcggtcttggagctacacaggccttaaatggatttaatgccatcggacattcttcgttctgcggtgagtaatgcataaataagtccccctttgcgtattatgtttctctgaccatccgccccggcggatgaccagggctttttcaccctttttctgttgtatttaagataccaaaatcccccattttccaacaactgcaattcatacaaaaaaggccatgtcaaagtccgtttatttttagacaatctggttaaaacaaccacaatttctcacccatgctctctttactttcgtaatccattccataggatttctctttttggattgatattatatagacaaagaaacaaactactaaataaaattaatgtaacggaggaatgcatatggaacaatataaaccattaaaaggcgtcaaagtggtggaattatctcttatggtagcttctgccagctgcggacgtatgatggctgactggggtgcagacgttatcaaactggaaaacacaaaaggcggtgacaatttccgtaaatggccgctgtccatcggtgctcctgcagatgatgatttcgacccgatctttgacaacttaaacgccaacaagcgtgctgtcagcattgacaccagaaccaaagagggccaggagatcgtataccgcctgttagaagatgcagatgtattcttaaccaacttaagaacagaagcactgcgcaaacagggccttgattatgatactttaaaagaaaaattcccaaaactggttatgtgtcagttagacggctatggtccaaagggtgaagaagccggaagacctggttatgacaacactgcattctgggcaagaggcggctttatgtacagccaggctgtatatggagacagcaatgatacctatcctgtttacatgcctatgggctttggtgataccacctgtgcccttggtatgatggctgctactgtttccgctgttttaagcgcaagacagaccggaaaaggtgaccgcgtttccttaagcctttacggaactgcagcatggctggcaaacatccttgtttccggttcccagtatggttttaaaatgccaaaacgcagagaaaattccagtccctttggtgctcctttcaaatgcagtgacggccgctggttcatgcctcaggttgttgtatttaacagggatactcctattttctatcaccttcttggtgcagacgatatgatcggtgatccccgttatgctaccagggcacagtttaatgatgtaaatatctgccgtcctgttatcgaacgttttgagaagatattcgctacaaaaactgccaaagaatggtatgacatgttcagcgcagaaggcctctgctgcgagatcttagcccgttacgaagatgtccttacggatccacaggcaattgccaatgatttcgtctacaagatgaaatacgacaatggccaggaagcaaccctggtacgcacctgcctgcgcagcgaacgcatgggaaccccggaatttaaccgcggaccgatgcttggtgaacacactgtatctatcctgaaagaagccggatattctgatgaagaaattgagaaatatctgtctgaaggaatcatccgccagcatgactaatctgtttatccatagaaaataactttaaagggagcgccggttcaaccggcagcccccttttttagtttgccatgttcttttatttccaggtcatccgtccataatccagaatcgcttttccatcgctgtcctttaccatacggaataatgcttcattttcccctgttttccatacatgaagggtaaaatgatctcccggcagtgctactgcgcggaactggttctcaatggataccatgcgctccggctctcctgggaataatgcatcgatcatcatgcggcaggcatagcctaagctgcaaagtccatgaacaataggacggtcaaaaccggctttttttgcaaatgcaggatctgcatggagcgggtatgtatcacctgtcagacgatacagtaacggcgcattctccggatatgcatcctttatctcatagtcagcttctctctccgggatcactacggtgctgtgaggtaccttcggcccgccaaaaccaccggcccagcggtttaaataacccattgtattggtaaatacaggatctcccgcctcatcttttgcaataatatctacgttgatcttggctccttttccttctccccggtcatatacggcgctgatcaccttttccagatgaagttttccttcttttgagataggcttgtggatcaccagcttatgatccatatgtaaggtgccgtcagaacgaagtccttcgatcttctttgtaggcattaacggctgctctgaatatggttctgttccaaaggtagctgtacatgggatcacaccaaaggtaggtactgccttcaagcccttttcatacacatattccagctcttcctgctttgccccaacacttaaattataaaggatcagatctctccaggtataggaaaaatcctgctctacggataaaccaactgcagactcatctaacataaaagtaacctcctcatcttcctctgaacataaaggctgctgcaaaacatttttcctattttgcggcagcctcactttcatctatgtatcctgagcattatttaattttgttcttacggatcacattgccgctgataactactctctggatctcattggttccttcaaagatctggaagatcttcgcatcacgcatcagcttctcaaccgggtaatcacgcatatatccgtatccgcctaagatctggactgcttctgtagtaacgcggtttaatgcatctgagcagtagcacttagcgatcgggcctaaagttgctgctaaaggatcacctgcatctaacagtgctgctaccttcataccgatagcacggctggtctcaatggcgatctccatatctgcgatcttggaggaaatagcctggttcttgtaaattggcttgcccatggtagtacgctcctgggcatattttacgcatacttccatagctgccttcataatgcctacacagccgcttcctacgcctgcacggccctgctccagagtcttcatggcaattttaaagccttcgccctctttgccaatcagtgcagatgcagggatatgtacatcttcaaataatacatcacaggtagcagactgacggatacccatcttatcttcatgcttgccaatgctgatgcctggcagatgtgcatctactaagaacatggtcagtcccttatacccaagacttctgtcaatagaagcaactacacacataaagtctgcatagcatgcgttggtgataaagcacttacgtccgtttaaaacatactcttttacatttccatcttcatctaaaatcttatcagctgtagtcttgcatgcacctgcatcggatcctgcttccggctcagtcagagcaaaagctgcaaatccgctgcgtttctttggccagcgtggatctcttcccggcttatcgcttgttaaaatttctacacaccattttttctgctcttccgttcccgcgatcagaaccggcttgatacccagattgttggttccacatgttaatccaaaacctgcatcaccatacatcagctcctcacggatccatgctgcagatacattgctcagtccctggccgccgtactctgccggcagatctgcacatacaagacccatttcaaatgccttgttgtaagcatcccagtccagttcaccggaaatatcgtgctctgctgcctttggacgaacctcctttaaaacgaagtcatggaccatatccacgatttccttatcctcacctgttaataccaatcctgctgccgctgtatccagcatacgattaccacctttctccttgaatattttatggactccaaaaacccggttgtaaactgcgttccaggagcatgtttgtatttcatatctctatgtgaatataataacagattcccttcattcctcacacgtttacacctacaaaaaaggggtgtttcaaaatatgctgttgtggtcaaaataaccatgaaattttgcacagtttctgctatactgtatttgttgtattctgtcctcatgaaattatggggtattttacacacattatcattgttaatttatttacgaaaggggatttaccatgaagctggctcagtgtattattcttgatcttttaaaagactatgatcctgtacccattctgcctgaaacatgtgattttcatttttccggtgtacagcttttagatcaggataatcctaccgacgatccatccattctttacataggaacaactacccagatttcttcctttgatacagaaaaattaaaagacttctgcatcatctgtattggaaaaaaagaagacgtttcttcttatatagaaaactatcaggcaaatttgattctgatccctgaaaaccattctcttgcttccgtagtcaacactctttacaccggctttcaccgcattttaagatgggatgccgaactgcagaatgctatccttagcaagcagaattaccagtcccttttctccattggcggccgtttctttggaaaaaatgtcatgctcatggtcaattcttcctataatgtcatcggcgccaacctactagaagcacctgtccatgaaaagctggatttcattctgaaaaacggttactattccaaagatcttacggatggactggcacagatgggctatatggcaaaaggattccagtataaaacacctactatcttaaatccgcccaactatatgaattgccctatcatggttctttccatgcatgcagataacggcatttttcttggttttatcaccatttactttattgaaagccagccaactgccactcagtttgagcttttctcccattttgccaaaatgatccgctgctattatctgaaaaacagcgaagaaaatgcttccactccaacaccccttgagtcctttatgagcgatctgatcaaccacacccaggaagatgaagcatttatgcaggacagagcccgtacactgcatctcccaatagaagccacctaccgtctctgcgtgatcaaatgggataaattcatcctcccacaggctgactatgtaaggaaccgtttaagaagctgcttaaaattcccgctgtttcgcgtagtcctttatcacgattccatccttttgctgcttcagggaaatatccccagcttaaaggtcatggaagagatcaatgactccatgggtgaattcagcgaagtattaaagatctgccacggatatgccggcttttccactgccagctttcctcttatgaaattaaatattgcttatcagcaggcacttacagcagtccgctacggcaccatgttaaacccagataagggcatttacttctattcccattattatatttatgaaatgctggatgaatataagaaacgttatgcattagaagatatgtatatccagaaactgaaggaactgaaaaatccttcagaagagcattatgacaatctttcccttttacgcaactatctgctcacggagcgcagtatttcttctactgcaaagatcatgcacatgcacagaaacagcgtgatctaccgtctgggaaagatccaggaagcattaggctttgacttaaatgacccggatgtaaggcttcgtgttctgatctcctttaagatcctggaactgataagtggccatatagagccactgccctgcatcgatggtcagcagggcagtgagtcttttaacttttatgaataatagagagtatggattatgcttttaatttcctgatctctgctgtcagtgttggcagtacatcaaagagatttcctacaataccgtagtcagcagctttgaagataggtgcttccgggtctttattgatagcaacgatgcagtcagatccggacatacctgctaaatgctggatggcacctgagataccacatgcaatgtaaagctttggtcctacagtcttacctgtctggcctacctgatgtgcatgtccgatccatccggcatcaactgctgcacgggatgcgcctacggctccgcctaatacttctgccaactcttcgcaaagcttaaagttttcaggaccgcccattccgcggccgcctgctacgatcacttctgcatcttccagatttaccacaccagctgctgcttccctgatggattctaacagcttagtacggatcttttcagctggaacagtcacttcttctgtaatgacttccacttcttttccctctaccggtgtcttcttaaatacgcctgggcgtacagtaccgatctgaggtcttgtattcgggcacatgatcactgccatcaagtttccgccaaatgccggtcttgtccatgctacgtttccgctttctgcatcataatccagactggtacagtcagctgtcagacctgtacgcagacggcaggacagtcttggagcaaaatcacggccattgttggtagcaccgatcaggatggcacttggctgatatttttcaactaaactggtcattgcataggtatatgcgtcaaagctgtatttctcatattcgccaccggatacactgatgatctggtcaggtccatatccctttatctgctcaattgcttccgcattgtccttgccaaatacaacggcaactaacttctcaccggatttttccgctaacatacggcccggatttaacagctccagacctacactttttgtttttccttcatctgtttcaatgaatacccagatatttttatttgtaaactcgctcatagtcctcacacctctcagataatcttggcttcgctcagtaaagcagccagttttacagcagattcactgccggtctcctcatttaagatcaccgcatcctttgtctggacaggtgtaaatgtctttttaaccttggtaggagaaccatttaagcccagtctctccggctcgcataccatatccggatcactgttggtaatctcttcgatcactgctctgtttgcagccattttactcttaatggttggataacgtggatcataagtggtcttggtcactgtaaccagtgcaggtaaagaaacctctaccaaatcatgtccttcgtctgtatctcttgtaacatgaagctttccatctgccatttctactgctgtagctaaggttacatgaggcagatccatgtgctctgcgatctcaggtccaacctgtgctgtatcaccgtcaatagcctgttttccacagaagatcagatcaaatttctcacctgtcttagcttctactgctgcaatagccctgcttaaaatatagctggtagccagtgtatcagaaccgccaaatgctctgtcagttactaaaaatgcctgatctgcgcctactgccagacactcctttaatgcattctttgcctgagccgggcccatgctgataacgatgacttttccgccttctttttcctttaaacgtactgccatttccagtgcgcacgcgtcaaaaggattaacgatacttggaacgccttcacgaatcaatgtgtgcttaacaggatcgatcttgatctctgttgtatccggcacctgcttaatacaaaccaaaatattcatactttccacctctgttttataagataatgatgtttattaacttactttatttgcccttatactcaggagttctcttctccaggaatgaacttacgccttctaatttatcttctgtactgcacagagtgctgagagctaacatttcaagaagttctcccacatcctggctggatgacatggatgcctgtaccacacgttttgcaatgcggatggcaaccggtccctttgcgatcagcttagaagccattttcttagcttctgccatcagatctgtctttggcacacacttagtggcaagtccgatctgtactgcttccggtccaccgatcttgcgtcctaaaaggatcacatcctgggctcttcccagtccgatcagtcttgcaagtctctgggttccgccggctcccggtaaaagtcccaatcctgtttcaggaagtgcaaataatgcatcttctgatacaacacggaaatcgcaggcaatcgctgtttcacagccgccgccaaatgcatatccatttactgccgcgatcactggtttggagcatttctggatcagatccagtgctttctgtcctgcgccgcctaagcagtctgtagatttctttgttttcaggctgttaagatctgcacctgctataaatgccttctctcctgcgcctgttacgataattacctttacttcatcggccttatccgcccatgtgaaaaactggttcatctctgcccatgacagatcatttaaagcgttcatcttctccggccggttggcagtaaacactgcgataccctgctcgtcgatctccagcttaaaattctggtattccataaaatatgaaacctcccttcatatctgctgttataatattaactatttttcggttctatttcatcttcatattttccaaaaataaatttcttcccgcagtcctgatttgtactttttaaccttaatttcccaataccgttttgttaaaatataaactatcaaagatgggattattatatatctacagccttccggctgtagatccataaaaaacagaggaggtatttatcattatgaaaccattggaagggattaccgtagtagagctttctacttatattgcagccccctcatgcggacgtattttagcaacacagggcgcacgggttatcaaagtagagtcaccagcaggggatgtggaacgtaaattcggtcctactttattctgtcctgcaaacgatgaggaaaaccccatctatgacaccttaaacggcggaaaagatcacctgatgctggatcttaagaaaccggaagatatggaacgcttccataaattattagcaaaagcggatgtatttgttaccaacaaccgtcttcaggccttaaagaaaatgagactggactatgattccttaaaagagcgctatccaaaactggtctatgccatcctgttaggctatggcgaaaagggtccaaaagtcaacttaccaggctttgatgccattgccatgtttgcaactggtggtctgatccaggatatgatggtagatgctcctggaagctatcctgtatacctgccaatgggctttggtgacctggtatgcggaactgctttagcaggcgctatcggaactgcattatatggaaggactcagagcgggaaaggtgattatgtatccatttccctgtacggcgcagctatgtggatgttcagcgtcatgtctaccggtacccagtttggctacaagtggccaagaggacgttatcagggcggacctatgggcgttccttataagacaaaagatggccgctggatccttcctgttgtcaatgaatatgaacgctactggagaccattctgccaggcagttggcgccgaggaaatcatggacgatccaagatactgcaccaagcaggcaacctttgatccgaagaaccgtgaagactgcatccgctattttgaagactgcttctctaagttaaatgcagatgaagttcttccaaaactggaagccatcgacatcgttgtcagcgaactggctcattttaaggataaccacactagtgaacaggctcttgtaaatggctttatgagtcctatcacctacccaaacggcgaccagatcacactggcaatgccgccgatcaaaatgggttgcgtagaacagccgcatgctgaaaaagcacacaagattggtgaagacaatgaaaagctctttaaagagttcgatttataatattttcgtatagcattttcgcataatcattttatggaaaggaaactatcatggattatcagtacatattaatagacgtaaaagaccgtatcgctaccgttaccatcaaccgaccggaatacagcaacgcatttgcaagagaatcctattatgagattgcagatgccatgaataccttaggtgcaagagacgatgtaggcgttatcgttatcacaggcgcaggaaaacatttctctgcaggtggcgatatcaaacgttttaaaatgttagtagatacaaagacctacttaaaagcagaagatatcgaagcagtcagcgctatgccaatatccatccgcaactgcccgaagcctgtgatcgctatgataaacggtgtcgcaaccggcgccggattaagctgcgcccttgcctgcgatttccgtatcgtagaaccatccagtaaaatgatcatggctttcgtaaatatgggactttgcggtgataatgaaagcatctacactctcacacgtttattagggcctgacaaagcagaactgatgatgatgaccggcgatgcctataaaggcgaacagtgtgtaaagatcggccttgcaactgttttggcagaagatggaaaactggcagagaccacttatgcactagccgcaaaactggctgcaaaatcatccactgcccacgccagccagaaacgcctgatccgcaagtacttctacggtgacatggaaaaatttgcaaaagacgaaggtatggaaatagctgccaattcccgccagcctgatttcacagaagctgtcaatgcttttattgaaaagagaatgcctgtttacaatcagaaataaatcaagatatcaaaaaagcgccccctgcatttgcaggaggcgttttttgctacgcagccgcttgttttttggctacgctcattaacttctcaactcaatctcataagccttctttaactgctttaagatcttctttacatatccatctactgtatcagcctggaatgcttcttcctttggtgtgaacaggacggtgaatgccatggacttcttgtcctctgcgatctgctggccttcgtatacgtcaaagagtgttacgtccttcacaaaggagcaagcctggtagatgcactcttctacctgtccgcaggtgatgtccttgttcattaccagagccaggtcacgcttctcttctgcgaattttggaagtggttcaaatacaggtgccttgccgtaccatttctccagagccttcatattgatctccagaacataggcatcttcacgcattgcctctgccttcatgatctcgtacttaacctgtcccagataaccaactacttcgccttcgcaaaggatagcagcagttctgtatgggtgcaggaatggcttttcggttctttcataagtaaaggtaagatgaagcacatctgctactgtctctgccataccctttaaggtgaagaaggactcatccttaccaaaagcaccgatacacagtgtctcacgctcttccggatactcagtcagaggcagggactttggaataaatgcatttccgatctcgaaaatacgtccctcaaagatacctctcttctggttgcggcccattgcatggatcatctgaggagccagagtggttctcatcaaggaaagatcctcgttgatcgggttcatgatgcggatcgccttgcgctcaagggcatcttccgggaattccatttcatctaaatcagccggtgagaagaaggagtaatgcattccctcaaatgcgcctacactgcagagagctcttttaacctttaaaatggtcttctgacgcatatttgttccaccgatggttacctttgcagttggaaggaaagtagaattaatatggtcataaccatacatacggatcacttcctctgcaacatccggataatcttccatatcttcacggtatgcagggaaatgtaaggtcagctcatctccgttgatctcaggatcaaagtccagacctttcaggatgcgaaggatatcttcgtccggaacagtgatacctaatacaccatttaccttcttgatgctggtcttgaaagtctttggctctaaggaatttcctgtatttacgttcttgtgggtcttagaaacctttcctgctcccagctcttctaccaggtgcagagcacgcttcatagccatttctgttgcatactcgtcaacgccctttgcatatctctggcttgcgtcagaagactgtcctaatgcacgggaactcttgcggatgttgtcacgggcaaacttagctgcctcaaacattacctctgtagtagtatcgcggatctcagagtttaaaccacccatgatacctgcaagtgcaactggcttcttgccgtcacagatcaccaggttatttgtatttaaggtaaattccttctcatccagagtaacgatcttttcgccctctgttgcgcgtcttatgcagatggcattgccttccagataatcacagtcaaatgcgtgcagcggctgtcctaactcacgcataatataattggtgatatctacgatattggaaatagaattatttccaaccagagccagacgtcttctcatccatgcaggtgactgagccagctttacatcatatacatagtgtgcaatgtaacgtgggcacaggtccggtgcctctacagttacatcaaatcccgtcttttctacgtcggtctcagtataatctaaagcaggcatcttaagtggctgtcctaaagctgcagctacttctcttgccagaccaaagatactctggcagtccggacggtttgcagtaatggaaacatcaaagatccagtcatttaaaccggtgatctcctttacatctgcaccgatctcagcatcctccggcagtaccagaaggccgttgtaaccggcgcctggatacaggtcttcgtttaagccaagctctgttccggagcaaagcataccataggactcatagcctcttaattttcccttcttaatcgtaactacgccttcaatggtaacatggtcttttgcagtagcgtatacctgggcaccgatcattgctacagggaacttgccgcctgcttttacattgtcagcaccacagcagatctgtaataattccggtccgcctacattgacctggcatacatgaaggtgagtctccggaatcggctcacatgactcaacatagccaactacgataccgctgatgtcctttcctacctgccatttttcttctacttcaaatccacagtcaaacagctttttctctaattcgtctgcggaaacattaatatctacataatcatttaaccagcttaacggtacaagcatttctaatcctcctgtcctgatcgaacctattagtcatcgatctgatctaacacacgcagatcagactcaaacagcatcttaatgttgttgatgccgtattttaacattgcgatacgctccagaccaaggccgaaagcaaaaccgctgtacttctcggaatcgatgccgcagttttcaagcaccttcttatttacaacacctgcgccaagaacctctatccagccggtccccttgcacagtctgcatcccttaccgccgcactggaagcagcttacgtcaacctctacagacggctctgtaaatgggaagtaggaaggacggagtctggttctggtggactcaccgaagatcctctgaacaaacatgtctaacattccctttaaatcacagagagtaatgccttcatctacaacaaggccttccatctgactgaacattggtgaatgagtagcgtcatcatcagaacggaataccttacctggggaaacaaccttgatcggaggtttctttgcttccattacatgaacctgtcctgcggatgtctgggtacgcagtaagaactctggggacagatagaaggtatcctgcatatcacgggccggatgatcctttggtgtatttaatgcagtaaagttgtaataatctgtctcgatctccgttccttcgtatacttcaaatcccatggaagcgaagatgtcagtcagctgattgcggaccgtagttaccggatgaaggtttccataacggatcttctttggcggcatggtgatatcgatcttttcagactcgtaacgctgctgctgctctttttcctttaatttctggtccagttcatcgaaaaactggtttgcccattcctttgcaccgttaatggtcttaccaaactcagccttctggtcgtttggcacattgcgcatctctttcatcagaagaccgatgcggccctgcttgttgtctaagaaggtctttttgaattcataaacacttctggaagtggtcagagtttctgcacccttgcagatctcatctttgatcccagcgatcacttcattcagttcttttaaatcctgcatgatttctctccttttctttcttatatactccctgcatctttcatgtaaaaaatactgagagcacatttattgctggtggtttttcctcagttccattcacaactttgtgcttcgcactctactgcctgctatgcaggcgggttattcgttaatggctaaaaaaatccccctgcgcatacacgcagagggacgatcatttaccgtggtaccacccagtttcccgcagccagatcatataagatctttcctgcagacactttacggtatgtaacgtacaccagacggcactgcctactatttaaccttcagcaatgcagctcccgtgggaaattcggatatctgtctgaacggaaaaaggctcacagccgacgaccttttctctctgaccggaaacagtatcttaaaaacacgatcttcgcttttgttcttcattttatgatttcaggcatgtctgtctgtataagacattcatagtctgtaaatcattctaggctttttaataagaaaagtcaagttttttttcatttctggcgatcagctgtatactttaaaaaaaagaagtgttaaaatagaattaatgtaaacagcgttggaatgacataatttaccgaaatatacagaatacataagggaagatatttatgaaaaagcaaaaagagaaacacatactgacaaatcaacaagggtttacattagccgaattgctggtggttgttgcaattatcggaattcttgtcgcaatttctgttccggtctttgcagcacagctggaaagaagcagggaagcaacagatatggccaatgtccgggttgcttatgccgaagtactaactgccgtaaattccggtgatgtaaatgaaagcaggatcgtccccctgaagcagaaggaagatggctggcaaactccacgtaaagttatgatcggaggtatcacggaaaacgatacaaataactggatcggaaatcccaccgctaaaggttcttgcaaagtatactatgatccggctattggacccgtacttcaatggagcagggaattcagtaatatacataatccttttaacaacagcggcgtactggattacatccataaaacatatggttcaaacgtcaatcttgaaattgattccggctgtacaaattctaaaatggtaaaattgatacaaccattcattgatgaagataaaaacagaagcagcctgatgaaaacaggaacctgggcttatatgggaagcgtttctgatacaggcagtgatcataaaaatcaggaccgctattggttctggacttctgtagatataaataagaatggtttccaggccggagaaacagtccctatgattgtcagcacggcagatggaaaattttatatttccaattcccagacaactacaagaacctcaaacggaatgacctataatgtgatcataaaaagtacctcttcagccggaagtaaaaaacaacaaatagaagcatacaaaaaatacattccatctgaccctaaagactgctttgataatttgaatgatgcgtacgcagcatatgaaaaattagtcaaatccaatccggattatcagaaatatgaaaatacacttccatattgatatggggcttgactgtaaaaagtcaagccttttttcgttcctttaactctttcacatactggagaacacattctttcagcttctgcacactatcggaaggctccgtttctttcttcattcccattcccagttccctgatgctttccggtgtgaccggcacacagcacacatcatctgtattcccccggatcataaattccgacatcatggaaatgccaagtcctttccccaccatacggatcacggtttcatcatctacatacacagcctgctctttcgcctttacacctgccctgtcaaaagcagcgtgaacatcaatatcaaaacgtccataaggcataagaaaatcttgcccctcaaactcttttaaaggaaattcttttcgtccatttaagggataatccttcggcaaaatggcatacagcaattcataataaagggggatccattcacagttccggtaactttgtctgctggcaaagatcacatctgtctttccctcctgtaaaagttcaaaaggctccagggcattatccaccatccgcaggtctacatccacttttgggcagatcctgcgaaaacggtacaatatttccggcatccagaacatggccatactggcataggcggcaatccggatggtttccgtctgttgcctggtaatagtttgaatctgattttccagattggcatttgcctgaaggaactgtctgatagctggcaccagctcctttccctgttctgtcagggaaatgccattgtgacttcgtatgatcagaggaaatccaatctcccgctccaggctgtttaccagatgggtaagtcctgactgggtatatccaaccacttccgatgccttagaaaaacttcccagatctacggcagtcattaagatctctaatttttttgcttccataaatacactcccatgctttcctttctcctgtttttcaggcatttctgctgtcagtcacagttttcgcctgttcacagagtattacactttgtcatagttctattataaacatggatttcacaaacaacaagaaccaacgtaaaatgtaaagtaataaatgatctatataactattcaaaactaccacttataaatatgtaaaacgaggtgatccacgatcatgaataaaaaacatctttcccttcatcagcgcctgttagtagctgctactttatttggtatgttcttcggcgccggaaacctgatctttcctgtccatcttggacagcttgcaggacggaacctgctcccggctatggccggctttatcattgcagctgtaggaattcccattcttggggttgcagccattggaaatacacattctgacgggctgcaggcacttgcttccaaagtaagcagacgttacagttactttttcacctgtctgctttatctgaccattggaccatgttttgctattccaagatgcgctactacttcctttacaacggggatccagcctgttcttggaagccagatctcagaaagaacagcactccttgtcttttctgccatcttttttgccctggtcctctttttctctttaaaaccgggcaatatcaccctctggatcggaaaagtcattaacccactgtttttgttctttctggcaattttgatcctttctgccctgcttcatccaggtaccgctgtatctgcggcccagccggatccttcctatgaaacaggtgctatgtttcatgctctgtcagaaggctacggaaccatggatgccattgcaggtcttgctttcggtatcgtagtagtaaatgtgatccgccagatgggagtggatgatgatacagccattgcaaaagaagtacttcactccggtatccttgcaggtgttttaatggctctgatctatatgctgaccattcttatgggcgcacagtctttgggactgttcgctgtttctgaaaatggcggtatcgcattatcccagatctccagccattatcttggaagagccggacttgtgatcctggctgtaactattacttttgcctgcctgaaaacttccatcggactggtaaccagctgttccgaaacctttgtgcaaatgttcccggataagctttcctacaaagcctgggctattatttttacattattttcctttattggatccaacatggggctttccactatcatccgatactctgtaccggtcctgatgctgatctaccctccggctattgccctgatcctgctggcaatgtttggagaacattttcaccatgatcggaaagtatatgtatgggtaaccgcccttacctgggcagcatccctgtttgactttttcaaaactcttcccgaacaggttcaggtactgttccacctggataaagcagtaacactggcccagactttccttcctctctttaatctcaatcttggatggatccttccggcaatggttgggatgatcattgggctgggatgtaagagaaatgaaaaaagaagacggcaggcacttgcgtaatgcctgccatttatttcacatctctatttaattttccgatatcgttaattaattgagccagtcaccgcggtatggttctgtctgattatccggctttttcgtccatattttatatggatatttctggtttttcagattttcgtcgtatgtaatggtattgtcattttgggtgtcggttgcacgaagacggaattggtctaggactgacttaataccgcttacagaaccccatatattaccaattggatcatcgttggtatcccaggctctatacacacagttggtaatggttgcatcagttgcttcgctggtaccgcttccggttttgttggtgcgaccgatgagatagccaatgactggatcatttccagctccctgcattactctgctgacctttcctccaaaataacaggtatcaacggtcagatctgaggaattatcatatctgccaacaagtccaccagcacttccttcattacctctcatataactgaatatatttgccatactaaagctgttttcaatcttcaaacaaccttttccttctccgatcaaaccacctacattactgtaaccagaaatattataaggggcatgaaattgatcatcatctccgattgcagtcatatctggataatcattatttcttcctgccacatagcaattttggatcaatggaatttccttatctggtccttttacatatccagacagatccagattaccgatcaagccgcctgctccatgctgaaaatgttttccactgagataaccggaaaatgaacagtttgtaacctctaattccttcgcctttatttttcctacaagaccacctgctccataatttgatcccgttgaggcaccaccgatcaatacattttttccatatacatgaacattttttatggtgactttctgtacacctacatttactgcaattccgccaactccccatccttgcagttttatatcatcaccataaacgcggatattctccagatccagataagtgccatctctgacatcactataatcgttaatctctccagctgtatctatgagcactgctgcaccataggcgcctccctggatatatggatctttgatattcagatttttcactgtcaactgatcatttttagcaaaaagagccgtactttcattaccagacaatggcggtaagatccgcaatcccgctatggtatgtccacctccatcataggaacgaatagttgtattatcaatagctttaaaacttcccggatttgtaaaaccatttcctggactccatccatcatagatcttaacatccacaccgggataagcttccgaaagttctttacaatatgcttccgtgtttgcagtaaccgatggatcatccgtccacaaaatattatccgtctgctctacatttgtaatattaaaatcatttttatcatagaaattcaaattcagcagatggcgggaattagcaacctttgcagtataagtacctgtggtttcatcatagatcagtttgtcaaaataactgttatttttatcatctatcggatctgtaccatccgggatcgcatgcttatcacttgcctgtattacaagattgtctcctgctttgatataattatcctgccagtataaatacttgaaccctgaacggacaaacgctttattatccagatataaccttacttttatctgtttttctcccgtttctgttacttcaatccttttcgttgataatttatcaatatctgtccacgatgccggccaaccccaagtatttttttcattatatgccaactcaaccttagacgcatctatctcctctatatacattatcttgcttaaatccggatagaatttcacaagataatagactgtatttccattgctctgtcctttaatggaaaaacttacctgcagcggctcctgatttgttcccgttccagtatcgtctggaatgtcaagcacgtaatctacccatagtctattaccgttattcacttgcattcctgtctcctccggctcttccttctccggctccatccagtcgccgatgtggacgcgggcaaactttgggatctgtttaggctgggtggagtcgctgttttggtcttcctggatcatgttttgggtggttagatctgcctggatcagctggactacagttggcatcggataggtactggtcagtgttttatcgtaaggaaatgctttcttggatattgcctgagaattttcctcaaaataatttttcagtgtatccgaataacatacagaccttgctccgtttaccatggatgagctgtagcaataccggaagctggcatctgatgcagccttgccactgcttcccgtattcaatgcgccataaaccgttacaaaagcggcttcatcctgcttctcgttcgccttgttcattttagtatcggtctcagaagcagccggtacagtgccataaacatcagaatgcatataaacggatgctgatacataggtacgttccacctggctaccacttggcaggatcgcagccagaccacctgcaatggtatctctggaaataacattataacgtccctgtgttgtatcaaagttttcttctgccggagtcggatggaccaggaattttcctgctgatgtatgaccgcctacgtaactgttttcgatccgtgccggctgatctcctttattatcaaccacttttcctaccaggccgcctgcaaagtcatatccatctacataaacagacgcaacacaaccggaaacagtcagttttccagatacagaacctgccagtccccctgcaacaccatactgggaccgaattctgtatgttgcttcaactgccgtatccagatctttctcagcttctgcatcatccgctgctacttttgtgcggtaggtatccgctgccatggtcttactgatggtaagttctgttccgctaaaagctcccaccagggctcccgcatctacttctgtgtcactggcagcatccttctcccctgtcgccgtgatcttcggatactgtacaaaaacattctctacagatatgtttaacggtttaacaggatcaccatatctgtcaggtatatttataccaaatcccaccagcgctcctgcactggtttctgaggttatatccggccgcaccagcttcaggtcttttacatacagatcttttgtaacatttccaaagcatccgcctgccagggtatctcccttcacattcaccagaagatcatttattttatgcgtatttccctcataagacatgacaaactgtgggtttaccggagcatagcagccgggctgcgtatatttaagggaggtataagttccgcttcccgttgcataacaaacagaaagtttatctgcttcccttactacccggttatctccatggctaatatgaatttgatttacaacatttgttctgaaatctgtccaggaaagatcctcctgctgggaaaccacatacccattggatccatcttctgccggggtcaatccgatggcttccccactgtcctcaggcttaaaaccggagatccggtaatccaggttttccagatgccggatactggaaacaagcaccttattttccgttatatcctggaagatactgttgcactctttgatttcactgatcacacttccgttgctgtttgaaacctccgcatagacccgtagatcttctcccgggatcagctttccttcctttcctccgtctgaacgtttcaggtcctggctcagaccggcaaaacggaacccctcccatgtgatatcatctaagatcacataagagactcctgaggttccaatggatatcactctctgtctctggctgaaatccatcaggtcaatccagcctttggcgccgctggacatgccttctacccacaatctcattgtatactgggcagtgggagacatataatcatctacttccgcatagagaacatccccgttaaatatcttcaatgttggtttctttaacttgggatccggaatcacttccgggtctgtcatggactccccgttataatatccaatggcttctccatgatacttctctctcttatctgcagataatgcagcctgggccagttcttcactttccaggtctgtcacctgaaatacatacttgtctgagtaccatacttcccttacggttccctctttcgggttataaccaatcgcataacttccatctgtacggacggtttcatcaatggaaccaaagggaagcagacgctgtctgatatcttctgtgtcattgtttccctcatctcccggctgatacagaatataatacaatccctgtttttcctctgatcctgaggataaagtaagccccagcttatcctccgagtcaggatcctccggatccggatattctgccagaagccgttccagacttccaccggccttttccaggctcaaccggttctgggctgccagaaaaatctcttttgcagtctggtccatttccagacgtcttaaacggctttgataatggatagctgtaacaaaagaaacaccggcaaggatcgtggtgatcgctatgaccaccagaaattccgccagtgtaaaaccgccttttctttttttctgcatataggttgtgcgttccatttctctatcctccgcagaatatccagtctttcttaccgcttcatttatgcttcatctcagctgcagttaaactgtaactaatttaatccttccagatttacagcgtgtactgtcagctgatccaggtgcgccattggcaccttgtctgaccgctttgcatctgccttataatatacattaatatcttttactgtaaaacagccatcttcatagctgtactggtctacattaaaatccgtataaaaccgttttgccatagcaccgtctgaaagaaggggcactcttgtttcctgtccgttatcggcaataaaaaccttgcagatcccggctttattcgtattttcttcctgtgtcccgtcggcttcctgataaggcactgccccaaggcgcatccagatcccgttttccccgttataaaactccggaccactggttccgcccgtccgcacttcctgtgcctgggataaaacatcagtgatcagttctgccgtagtagcaaggacctgctgggcttctgccttctgtgtagtcttcttatatgcttcttttactacagccacaccgccgccaatagctgtagcagtcatggaaaggatcagtacagccgctaacatttctgtcagcgtcataccggcctgtgatctcagatgacattttatttttctgtatgccctcatcatattcccattccttttcatgttcctgctccaataaatacttcttattacttcttaatttttcctgctatagcggaaatactgtcctgtttttgtaccttcctggtcagaatacagatcgatcctgtactttcctgcgccctcgtttccggcagaacgccccaaatccgttcctgtaccattttgttccaggatcagcctgccgttgcgttcatcctttgtctcttccccttccaggatattcctctgggtgtaataagcctgcatcacagcatcgccttttaccagcatctttttagaactcatcattgccgtagcaaacatggtaagtcccagaacgatcacaagaacagataccagaagttccgccagcgtctcacctttagaggatctcagctttccaaacagtctgtctacatgctccttcatcctactatcagcctcctgacacaccggtatccggatgtgttttttctatcattccccgctcccagtaaatctgggtaatacgtgtggtagtggtgatcgtccactccgaaatcacatccccgttctcatttgtttcttcgtgttcttcttcctcttccatttcatctacatggactttcgctgcaacagtcagcttccgttcacaccggttttccggatggtcatccccggtctgtgtatcagaaatatcaactgtaatattgtactggggatccatagtcagatgagccgctgtctgaagctggtccagatcctttatactggtctgggttccatctgtctgggtaagctggacagaaaaggtaaaatcctgttctgcagtttcaggagatgagccattctgtgcatttccctcctgctcagagaaggatccgttttgtccatcttcctccgctaaagaagtatatacctgtttaatacagctgcctaaaatactgtcatcatccaaagtttccccgccagtgtaaacatattcctcagaataatccggctcttcttccctgctgtctaccactcttacatctgtgatcttcacagcggtcttactgtcacttaattcatcccgcaaaaaagctgccccggactccactgcaaaccgtttctggtctgttacaggtacctgctgcattttgcccgcagacgcggaagctgccgcaaggatcatagacgcggctacgccgcacagcacaaaaaacaggagagctgccaccagactggcgccattttcgctttttaaccgtttacctgctgttactaccatggtttattccccgaatgctgcttctgctgctgtttccaggtcagagcgctgcagatttgacatatcagaatttgccagaccaccgccggaagctgcctgtgtctcttctacctgcaggccttccaggctttcagccccttctgttgtttcaaaataattcatattaaaggtcagttcaacacgaccctctttgatatttggctcaaaatccgcatccaccgcagaaacactgtccatgctgatgttgtagatcaggctgcggtaaggtccctgtaagatttccctcatcatttccacagcagcatcgtaatcttctgccgaacagttgacggtaacacttcggcggatattggttccatttacctccggctcattaaatgtaaaaagaaaatcataagcctggccgtggatccggtttaattcttccagttcttctttaaaattgttataagaaggcaccaccggagcatctgcatccttattttcctggatctcagcctgcatggatttgatccttgctgactttacctgctccattgcaattgcatcttccagatctgtggtatctgctgcttcgatccgttcctgaatgggagaataaatccccacataccagccggtcagcaggatcagcagcagcaaaacaacgatagctgccttttctttttttgtcagaacataactcattaaggatttcatgataagtcctcactctctcccggcgcataaaaataaacagtcacctgtgcccggaccactttatcttctgcccgtttagaaatatccagcaggtcttcatcctctgtttcttccagagacgctgttacatagcgcacagccccatcttcctcgatgtcctggatcaggcttttcagcattgtccccctctcaagagtacattcaagattcatctgatcatccgtaacgctgactgtttcaatggttttgcatatagggaaaatagtatttttcagtacatctaacattaccagacggtccggcatcactgcttcctgatcatttctccaggaatttccatagtgggcatattctgtttttacttctggcataatgctgttggcctgcttcataacttccagctgggcttccatacgctgataagcagcctccgcacggtccgctctttccataggcattacaatacccacctgggaaaaaccgtacaggaatactaaaaatgccgccaatgtaacaatctgccctgcaacggcacctttttttacttcacgctgatacagattgatcctttttttgtccggatatttcggaccaccgatctgcattttagcgatcttttttaaatccatcacggtcttcctccttatacaagtaatactcctactgtctgaggactgtcgatccattccggcatcttctttgcgtctaattccggaagtatttctccaatacttttaaccggaattcccactgtatcacttaaagtatcgatcagtcccttgtatctggcaccgccgccgcagtaataaagactgtctatggtattatcactgttgttgaaactgtagaagttaagtacacgcatggcctgtaccgcaatggtctgataccggttacttaaagcttcatccagtgttttttcacctttttcgccccagaatgtatcatcatcatctacatttaactgtaccagctgttccttatctccccgtcggatctgctcgatctcttcacagcctggctccatggtacgggtggtatcatagattcccttgcggaagaaatgcatacgcagggccttagttcccagatccaggactgcaaagtctttcttttcttcaccctcgttcatatgctccaggatacgttccagaccgatcacaccggggaccagaccaaccagctttaattttgccatttttgcaagtttcaaaaactgctgacacaggttttttctgcagcaggcagcgatcaggtccatctggtcttctgtcctctcgatcacaccataatcaaactggtactgttccagctcatctccaatataatcgtggaattcaaatggcaggttcagttttaactggtccactgtcataagagggacgctgcaccgctttacataggtatcatcctggcgcagtacgaacactgcgttcttgcagcgaatattattttcttttaaaacgtcctttataagctccgcgtatactttcatatccgtctgattttcagtctccagacgctcggaaacataggtctgcagttcgccatgttccatatatgcgatttttacacggtaatgtccaatttcaatacccaaacaatttttcatatattatactccgctttaaaatagccccgtataccaccgggtcatcacgtctccatatacgatcataataaaacatgctgccgcaatagacggaccaaagggaagtttctgggtttttctgagagcagcaaaaccaagtcccaaaaggcagctcaaaataaggtaaaataaaatttcccaggctgacccaaggtacaacccggtcataaaaaataatttaatatctcctccgcccaggctttcttttcctgtgaggcggtcaaaaaggagagataatacaagcatgccgccgcctaaggcaattcctaacagcaatcccctgaggatattgtgtaatggatccggcatgaaaacagttgtagctaaaaatacaagaacacctgccacatgaagacggtcaggaatgatccaggagtgcaggtctgtaagactgacgatcagcaggatcaatcccagaaggatcccctgtagactcataacagacaggtcataccggtataccaccagacagcagccgatccctgctatcagctccgtgataaaggactccggcgggatctttgcgccgcagtaacggcatttacccttcaaaagtagccaggaaagaacagggaacagatccagaacacctaaaacatggccgcagctgtcacagtgggagcggccggaaaggacggactgcccggataccaggcggactgcggcacagtctgcaaagcttcccaggcagcagccaaggataaatgtaatgaaaagaatataggctgtaatgccgaaactgatgtgaagcatattgtaaatctcctgtttataccaatagatcaaccagcagtagatgaaccatggtctggaccaaatggattatcgtttccacccttgtatccaatttcattatcatctgtataatagggagctgtctgaattgctgaagggttgttgtgatacttatcattttcgttttctgcatttcctatgaaaacaatgatctgatccaatacttccccatttatagccttattactaagctcttttccaagggtgttgcaactttttccattgtactgggctccattgtagttcttatcattcaccttaattacatcactcagctttccttcttttacatcataaataaaataggctgccgtagtaagggtattgccgttatgtacatctaaaagatctgaattgctgtaaaattctgcagttgctgctgcttttgcggctcggatgttcgctttatttgttgcaatgaccgctttcatcctctgggctgtaaaaacaggaatactgatagctactagaatacctacaatggctacaactaccaaaagttctgccagtgtaaagccttttttctctttgatctttttcatattcataatttcaccgccttggtacaactttttctccccggtttcttatacaagaaaatggatgggggaaaccccatccattttctccacgtatgtggtttctggtgttttgaaagattttcaaaaattattttgactcagttgttgatgatttagtagacttcgcatacatctttacagactcattagaaattgtacccttttcatcatctgcggaagtagtaattcctacccagatatcatcatacactactttaccagagatttttgcatcatccatagttgaaaactcggtataagtgtttccaggtttatcagttttaggactaccgctttaactggtcattggtaagcagtcccagttcgatcagcatatcgcccaatcgttttgtacgcatatcttccttttatcctttctcatttgttctaaatccatgcaagtacatctctgaaactgattatactctgcttttcccatactggcaaatactgttccggtttttacctgctgcttttttcagaagatgcctgtaaaaaggcatctgcgcagcggtcccaggtaaatgtagccgccattttttcagagctttcctgcagatccttttccgaaggataggggccggtgatccattctgccatctcatcatcattttcgcagagcttgtgtcccttcatatcttttaatgttacagaaggtcccagggcgcggatagcagccacagaggttttataataaaccgcctccatgatcgccataccgaagatctcccctttgttcatgttcagataataatcggacatttcatagatctcccacatcttctcataaggaacattgggatagatctttacttctttttccagaccgtttttgcggatcttttcattcagttcttcttccagcggaccgtttcccacaatgatcagcttaaatttcttcttaccttttacctgcaaaaacagatcaatcagctctaaaggacgtttttcccaggataagcgggaaacattgcataagatcacgtcatctgcttcaaatccatgttcttttctcaggcgcattttctcatccgccgggatatttttctttaaaacagcgttatccagtcccaccggtgcgatcactgcgtgagggacacccagctgccttaattcctcttttgcagcgcttgtctttgccaggaccggatttttcttatagattcttaaggtacctgctgcaaaaagggcattcatcaccttgcttttaaaattggagtccaggctgtgggcagttcccacataggccacaaagggaatgcggcggcgcctgcaccatctgtatacatgaggcaggaagatctgctggtctccgaagcagaacagggcttttaactgcgggtccagatatttacagtccataaagccgtgcgctcccagatgcttcatgggaagataccagatggtcagatttttttccacctggaccttttcctctttttctgaggggtcgatccccttatagatcatcacttcatggccttttcgtgccagcgcccgtcctaaaccgatctcctggctgttgtagtatcctcctctgccaaatccattgatcatggtacataaaattccaagtttcatctgttttcctccacccatctttctcatcttccggaaatcatttataaactccggtatttccataccagctttacaattcccatatcgtcaatgaaatatcgtttaaaaagacggcggggttcttttaagaagcggtaaaaccattccaggccacactggctgatccatcttggcgcccgtttgatatttcctgccagaaaatctacagtcgcccctgcacatacggatacaatggcgccgcattttttataattttcatagatccatttttcctgtttgggacatccaaagcaggcaaggagcaggtccggatgggtctttgctaccagatggttgatcttttctatttctttggcatctttttcaaagcctaacggcggggcgtaggttccggcaatgctcattcccggataatgctttttcaccttttttgctgcttttttcgcagtatcccccagacctcccaggataaatacacttctgttttccctggaaagttcgtcaagcagctccggtaccagatcggaaccggagatcttttcccggataggggtatttcctttcattttggaaatccagactaagggctggccgtctaccagcgtcagatccgcttcatcggagatcttctttaaatagggatctttttccattttcattacaacatctacatttacttctacaacgtaggaagtctgtttttcacggatcatatcatggatccggtttactgactccatcatagtaaggttatttacataaacattcatcagtctttgtttttccatcggtgtttccctctatgtttatattttgtgtttatcttttatttttccataaaaattctttcagatccgatgccggaaacaggagcacacacaaaagtggcatcaatatcactcctgccagacatgtttttaaaaataaccccatccatgttgaaacaaaaggccagtgcaggcgcaggaaatgaccgatccccgttacggtcactgcggacagcacattccgtatgattgttggataaaattctttctttgaaagtcccaggcaatgggcggcataaagaggagcatcaaaaaaatgcactccgttgatcaccagtgtggtcaaaagaacggcataccctcctgccgacgtccactttaataaaaggatcatggagatcacatttgccactcccataagaatagttacaatgcttggaactttcaggcgcttggtcaatgtgtatacataatacagcggattgacggttcccggtaccagatcgcttgccagaacgatcatggctccccagaaaataaatttcgtattctgccctggcagccatatacgaaagaaatcatagccgctgacagaaaaaaggccgatcaccattgcctcaaaaaagccggtacagcgcatggcttttttcagaagttctgtcagctgggacatccttttttccgcatacagcattaaaagccttggtttaaaggaagaactgactttcataataacgctgttgcttaaaaacgcaatggtttttacaactgagatctgacctaagaccactgcatccagcatccggttggtgatccacaggtccagaccattatttaacacatttcccaggttgttgatggatgtccatatgcctgtagaaacgatctcccagatagccccgggagaccatttatcccgcccaaaacgcagatccggcagaagtttccggctgacagctacatttgccaacagtaaaaacagcgccgctgacatagatgccagtcccacataccatacgtgcgggaaccagtttaggcatacaaaaagcaggatccctgcctgcaaaagataggctccgctttgcagccgttctgttatatcgatgcggtccgcgataaaggcggctgtttcaaaggcagtccgcatgaccaccatgatatagcgcagaaggactaaaaagaacaatctttttacatccggcaccagttcctgtgggatcttacaaaaccaggtgatctttaagatcatggcgatccccagcaaaaataccgttcccccgagaacggcatctgccacaatggtagaggaaaaataccggtttgcctcctctttctgtcctttgtggtatgccacggaaataaaacggcctgcgtaggcgttcaggctaacggagatcacatccacatagctgataaaggtattggcaagggctacaaagccataggcttccactccgatattattggtcacataaggcgtgatgagaaaattcatcagggtgttgatcaaaagggaaaacagcgcccagaacatattcatcataatggcccgcttcatacttgtttcctgtttctgattgttcatcttttcctgtacgcctccctcagaatttttgcggagatcttccagctgtacttttcctctgtgagtttttctatttctttctgatcgtccagatactcttttctggaccagtccgcagcctttaaaatagcttctttcagtttttcaggatccccgcctgctgttaagatacctgtctttccattttgtgtttcttcccggaaagcaggaatatcactggtgatcaccggtttcccataactgtaagccattaaaagggcgccgcttccataaatgtcccggtacgggaacaggcagatatccgcctgacggtaaagggcatccagttcttcatcgggaatgtgcttctttataaggtccactgtatcttccagccccagatcccggatcattgccccataatccgtagggtccagtttgggatgctgggctccggcaatgatcacctggatcttttcccgtttttcagccgggatctgtgccaacgcttttagcaggatatccactccctcgtataatatcttttagatacataaatacatag

SEQ ID NO: 3528 - DNA, 264 bp, Unknown
  gut microbiota DNA sequence
ctgcaaaagccgcttctgccctacttgcggtgtgaagtattcccaggaacgctctaccagtatggcctttaagcttgttaactgcacacatcgtcattgtgttttcacaatcgatgagaaacttcgtcatttcttcctggaagaccgttctcttttaaactgcctttttcgtgctgttcaaagcgtcatccttcacatgtttaataagataaataagtctcaaaactttgttcctggttttatttgtgtgcttcacactttcgg

SEQ ID NO: 3529 - DNA, 151055 bp, Unknown
  gut microbiota DNA sequence
ccttgaagacgacgaggtagataggtcagaggtggaagtgtggtaacacatggagctgactgatactaatcggtcgagggcttgaccaataaggtctgaaagagcggcggaaggatgacagaggagaccgttgaaagtttactttcataaggtcggatctggaagacttcagacattggcgaagccaatgacatgaggaaaatcgaagatttttcgaatgaccaccgcggagttgaagcaaagaaagttgtacttgaaattcggaagatcaacagttcaatatgtggttttgaaggtatgtaaatgcctttaatggcccggtggctcagctggttagagcgccgccctgtcacggcggaggtcgacggttcgatcccgttccgggtcgtttttataaaatgagaattatagtaagcaacaatagatcgctgatgaggcggttttttgttgcttatttttattataagccttaattaacgacagagtctaattttgtgcttccacagtctatcattgtcctgcatttttcttttaggaattcacgttttttataatgaatgataaattgtggaggaaaattagaatgaacatttacggatatgtacgggtatccagtatcgatcagaatgaagatcgacagattgctgctttacgggaagtttccgtacctgaaaagaaaatctttatggataagcagtcaggaaaggattttgagcgaccatattacaaaaagttggtgagaaaactaaaagcaggagatttattgtatattctcagtattgaccgtctagggagaaattacgaggaaatccagaagcaatggcgtgttctgaccaaagagattggcattgatgaatacgaggatacattggacagagaaatacattatgatgcaagtggaaatatccacatttcttacgaaatagagtatgatgaaaatcacaagtggatttcagaaactaaatatgatgcagatggtaatattatagaacagagaaaaaaccaataacctatttgcggacgtataaaaataagtaaaaccccataaaacggcaggtgaaaatattaacaaaactcacctgccatttctatacgagtttgccaagactaactcgtgccgaaatcacaaacatatgaacaaatgcacaaattatactgtatacattgtattttttgcagtaatacgaattaaacatttgcattttaacgaataattgatataataaacgtaggccagtctgtgagggcttgtttcccgcgcagacccacatgtatacttatatatctataatatacatatttcattcactaattgcaggaggaaatcaaaatggcaagaaaaatgaaaaccatggatggtaaccatgcagcagctcatgcttcatatgcatttactgatgtagcggctatctatccgattaccccatcttcacctatggctgaagctacagatgagtgggcaacagacggaagaaccaatatttttggtcatgaagttcagatcacagagatgcagtctgaggctggtgcagcaggtgctgtacacggttctctggcagcaggtgctttaaccaccacctacacagcttcccagggtctgttactgatgatccctaacctttataagatcgctggtgagcagctgccaggcgtatttaacgtatctgcccgtgcacttgctagccatgcattatctattttcggtgatcactccgacgtttatgcctgtcgtcagactggatgcgcaatgctgtgcgagtccagtgtacaggaagttatggacttaaccccagttgctcatctggcagctatcaagggtaaagttcctttcatcaacttcttcgatggtttccgtacatctcatgagatccagaagatcgagacctgggattacgaagatctgaaggatatggctgatatggatgcgatcgctgaattccgtaagcatgcattaaatccaaaccatccatgccagagaggttccgctcagaacccagatatcttcttccaggcaagagaagcttgcaacccatactatgatgctcttccagcaatcgttcaggagtacatggacaaggttaacgcaaagcttggtacagattataagctgttcaactactatggtgcagcagacgcagagcatgttatcatcgctatgggttctgtaaatgataccattgaagagaccatcgactacttaacaaagcagggcaagaaggtcggcgttgttaaggttcgtctgtacagaccattctgtgcacaggctctgatcgatgctattccagaaactgttaagactatctccgtattagacagaacaaaagagccaggcgctattggcgagcctctgtacctggatgttgttgctgctcttaagggaagcaagtttgaccaggttaagatcttaaccggacgttacggcttaggttctaaggataccacacctgctcagatcgtagcagtatatgagaatgaagctaagactccattcaccatcggtatcgttgatgatgttaccaacctgtctcttgagatcggtgctccattagttactactccagaaggaactactaactgtaagttctggggtctgggtgctgacggtaccgtaggtgctaacaagaactccatcaagatcattggtgataatacagatatgtatgctcaggcatactttgattatgactctaagaagtccggcggtgttacaatgtctcatctgcgtttcggacacagcccaattaagtctacctacttaatccacaaggctaacttcgtagcatgtcataatccatcctatgtacgtaagtacaacatggtacaggagctggttgacggcggtaccttcctgttaaactgcgcatgggatatggaaggccttgagaagcacttaccaggccaggttaagaagttcatcgctgatcacaagatcaacttctacaccatcgacggtgttaagatcggtatcgagaccggtatgggaccaacacgtatcaacacaatcttacagtccgcattcttcgagctgaccggaatcatcccagctgaaaaggctaacgagctgatgaaggctgctgcaaaggcaacttacggacgtaagggtgaagacgttgtcatgaagaactgggcagctatcgatgctggtgccaagggcgttcacaaagtagaagttccagcaagctgggctaactgcgaagatgaaggacttgactacaaggtagttaccgagggaagaaaggaagttgtagacttcgtaaacaacatccagaccaaggtaagcgctcaggaaggtaacacactgcctgtatctgcattcaaggattacgttgatggttctacaccatccggttcttctgcatacgagaagcgtggtatcgctgttaaggttcctgtatggaacgttgataactgtatccagtgtaacttctgttcttatgtctgcccacacgctgttatccgtccggtagctatgactgctgaggaagctgctaaggctcctgcagatatgaagatgaaggatatgactggtatgccaggatacaagttctccatggctatctctgctctggattgtaccggatgcggttcctgtgctaacgtttgcccaggtatgaagggtaacaaggctctggaaatgaagccattagaggctagtctgtctgagcaggctaactacgacttcgctgagactctgccagttaaggaagaagttatcgctaagttcaaagagaacactgttaagggtagccagttcaagaaacctctccttgagttctccggcgcatgcgcaggctgtggtgaaactccatacgctaagctgatcacccagctgttcggtgacagaatgtacatcgcaaacgcaaccggatgctcttctatttggggtaactcttcaccatctacaccttacaccatgaacgctaagggccagggtcctgcatgggataactccctgttcgaggacaacgctgagtttggttacggtatgttactggctcagaacgctatcagagatggcttaaagtccaaggttgagtctgtaatggctaacgagaacgcttctgaagaagttaaggctgcttgcaaggaatggttagatacctacgctgtaggcgcattaaacggaactgcaactgacaagttagttgctgcattagacggcattgactgcccaacctgcaaagagatcgtagctaacaaggacttcttagctaagaaatcccagtggatcttcggtggtgacggatgggcttacgatatcggcttcggcggtgtagaccacgttctggcttccggaaaagatatcaacatcatggtttacgataccgaggtttactccaatacaggtggtcaggcttccaagtctactaagaccggtgctgtagctcagttcgctgcaggcggtaaagagaccaagaagaaagaccttgctggtattgcaatgagctatggttatgtatacgttgctcagatctgtatgggtggcgatatggctcagactgttaaggctctggctgaagcagaagcatatccaggaccatccctgatcatcgcttacgctccatgtatcaaccatggtatcaagaagggtatggacaaggctatgaccgaagagaagctggctcttgagtgcggatactggaacaacttccgttacaacccagctgctgagaagaagttcaccttagattctaaggctcctaagatggaaggatatcaggacttcttaaagggcgaggttcgttacctgtccttaaccatgaagaacccagacagagcagctactctgttcgcacgtaacgagaaagaagcaaaagagcgttacgagcatctgtctaagctggttgcactttatggaaatgactaattcatcctgcaaagtgagttagaatagattaggttaaatcaaccccggagggcgtaaaaactctccggggtttttaaaaagaaagggaaatgcatcatggctgaaaagctgacaatggctgatattgcagagctggcgggagttaccaaaagtacagtatcccggtattttaatgggggaagcatcaaagaagagacgagaaaaaagatccagaatgtggtgaaagagaataactatatcccgaacagttttgcaaggctgaaagccaaagaaagcaatacagttggtgtgatcgtccctactttgaactcaaaagtgaccagccgtgtggtcacaagcgttggccgttatctgagaagtcagggatatgaggctttgatcaaggactcagatcacagcccaaagctggaactggaaaatatcaaccgcctttttacccagaaagtagacggtattttattcagtgccatttctcttaccgaggaacataagcagcttcttatgaattcgccggtgccggtagtagttcttgcccagaactttgaagagggaattactgtaactatggacgattacacagcaggaaagaccatgggaagttttatgggaagcagggtccgtggaaagatcgcttatttaggcgtagaggaagaagacgaggcagtgggaattttccgccgccagggagtcttagaggggatcaaagagagcggatcccaggtgatgaccgtagaaacaggagattatagctacgtaagcggccaggaaatgatggaaaaagtccttgagaaaggaattcctgacggtgtgatctgcgctacagaccgtctggcttttggagcataccgtatattgcaaaagcatggcattttaattccggagcaggtatcagtagccggttttggcggctatgatgaaagcgaattgttgtctccacagcttaccaccctgcgttttgactcctatggactgggctatctgggagcggagactcttcttaagatgataagagaggaaccggtaccaaaaaaacagatcgtaggctttgaaatgatacttggaaaaagtgtgagaaatgaaaatacagtaaaataaacgggaaatagacagggcagaaccgggcccaaaagggtccaaaagcaaagaaaagtaataaaaaggtcgtgtttgtgcaagttgcataaaaatgacctttatttttttacactcaacaatggaaccggtaccataaataacattgacattagacacaaaaaggtatatgatacaaatatggaaccggtaccaatcacaaacaggggagatagttacaatagagacagaaaaacaaagattggtaccggatataccacaaagtgtggtcatatatcactataaataatagttgtgtgaaatgtctccggaacaaaaaatccgagagaacattaaaaagaaagggaaggtaaaaaatggattacgcaaaaattgcagaacaagtaattcagtatgtgggcggtaagaaaaacatcaaatcagtagctcattgtgctaccagacttcgttttcagcttcgtgataattcactgagaaacgaagaagctttaagtgatttagagggtgtaaagggagtatttcttacacagtcccagtttcagatcatttttggttcaggcactgtaaatctggtgtgtgcagaagtgcagaagcagttaggcacattagaagagcaggcatctaatgaaaaagaagagaagagcggcaacgccatccagcgctttatcaaaatgctcagtgacattttcgttcctattatcccggcaatcgttgcaggcggtcttttaatgggccttaacaatgtgctgacatcccctttaataaatggaagcagtgtcattgagctttatccacagtgggcaggcctggcaacagcagtaaatacttttgcaagcgcgccatttacatttttgccggtgctcatcggatttagtgctacgaagaaatttggcggaaatgccttcttaggcgcagctatgggtatgatcatggtacatccggatcttctaaatgcataccagattggtattgcagatccgcctgtatggaatatcctggggctgaatgtggcagctattggttatcagggaaccgttcttccggtactggctgtttcatggatcattgcaaatattgaaaaacgcctgcgtaaggtaacaccttcctggctggataatctgacaactccgctgctgtctattctgattacttccttccttaccttcatttttgtaggacctgtattaagagaggcaggaaatcttctggcagcaggtattacatggctttataattctcttggttttgtaggcggcgcgatcttcggtcttacttatgcaccgatcactatgactggtatgcatcacagcttcattgccattgagactcagcttttagcagacagtgttcatacaggcggaagctttatcttctctacagctagtatgaataacgtggcacagggagcagctgttcttgcagtgctgctgcttaccaaaaacgaaaaattaaaatctatttgttccgcatctggtgtatccgctcttttaggtatcacagagccggctatgtttggtgtgaccttaaaactgaaatatccattttatgcagcaattattggttccggtgtaggaagtgcttatcttgcatggactaaaacactggcacaggctttaggcgcagccggactccctggatttatctccatgaagccggaagattatggtcactttgccatcggtctgatcctttctatggcagtatcctttggactgactgttgtattctggaaaaaaatgggaattgagaaagaaacagcagaagtagaagctaaaactacagatgcagataaagaagcagaagtgaattctgatgtgaaagcaacaacagatgagatcaaaccggaagcagttgtaacagaaccagaagagactgcagaaacagcacaggaaaaccaggaacttacctttacatcccccatgaaaggaaaagtccttcctgtaacagagtctgcagatgaaatgttcgcatccaaaatgttaggtgatggtattgcagtagaagcagcagacggaaccgtttatgctccatgtgatggtactgtatctttattattccctaccaaacatgcagttggtatcaaatctgccgatggcgtggaactgctcattcacgtaggtatcaacacggtacagttagacggcgaagggtttgaagcgtttgttacccagggcgatacagtaaagaagggcgataagcttttaaaagcagacctggactttatccgggaaaaaggtttaaatccacagactatgatgatcttcccggaagcaatgaacctggatattaccccactttccagtgaaaatgcagacgagaataccgcggcagtaaaagtaaccagaaagtaagactacaaataatacagctggcaatagcaggaggcatcccttgaaaaaatatgagaaagtatttcagaaagattatgaaacatggtatggggaaaatgaggcatacagaaaacaggtggcagaagacccggaccggcttgcatttcacctgatgccggaaaccggctggatgaatgatcccaatggtctctgtcagtttaaaggagaataccacatttattatcagtataccccctttgagccaaccggagaattaaaactgtggggtcattataaaacaaaggatcttgttacctatgaacagtgccagccggtcttattcccggacagcgatgaggatgctcatggcgtatattccggctctgctttctgtgaaaatgggaagatcaacttcttttatacaggaaatgtaaaattgtttgaccgcccggattatgattacatcaacagtggaagagtcagcaataccatgtatgtcaccagcgaagacggaatgcatttttcaccgaagaaatgcctgatgaccaacagtgattatccggcagatatcagtgcccatgtaagggatccaaagatcattaagagggaagatggctattacatggtcttaggagcaagggacaaagagagcaagggcctggtactggtataccgttccgatgacctgacaaactggaaatatcatggacggatcaccacagaaaatgcctttggctatatgtgggaatgcccggatctttttgaactggatggacagctgtgtctgatctgttgccctcagggtgtagaaaagaagggatatgattactggaatgtccatcagtgtgtatgtattccgttagattatgattttacaccgggaacctgggtaattaagactacagataattttcagatggtagaccggggatttgatttttatgctccgcagacctttgaggatcagcagggaagacggatcctgatcggatggatgggaataccggatgcagattatacaaatcctactgtaaaaaaaggctggcagcatgccttaacgatcccgagacagctccatataagggatggaaagctgtatcaggagccggtaaaggaattggagaaactttgccggaatggcagaacattttccaaagaagaattccaaaatttggaactacccaaatgtgccaaagtgcagatcgactttaaggattgcaaaaatatggaattttccatcagcgatggagtaaaactgacctatatggatcatgttctgacgctggacctgggtaactgtggaagcggcaggacgatccgcaaggtatggatcgaagaactgacagaccttactttgtttgcggacacaacttctttggaactgtttattaataagggaagccaggtatttactacccgtgtgtatggtaaacagggaaaagcaggacttaaagggcagtgtgatgcccgaatccaggtatatgaaatgtcaggttatgaatatggccgcatctgacggcggtattgaaggggtgtaagagaagtagttttgcgaaatactcgttcaaaataggggagatttataaagcccgcttcaagggcaatatccgtcatggaaagctcagtttctcgcaggagaagctgggcttttttgatgcggcagatgttctggtattctgtaatggtaaaaccggtaactttgcgaaagatccgggtcaagtaggaacggctgatgaaaaaatgggtagcgatctgatccaggctgtttttctcactgcagtgattttggagataaatagcaatatcatgtacctgctgatacatacctgtgtggaccagattgttttgaaggttttccttccagccgccctcttcctgcgtccttctgatctggatcaggagaaggagaagctgaacggtatacagacggatcaaaccgttggcagtcattgtgtcctgtttattgccaggagttgtccgggatgagataagtgtaaattgttccttgatctgtgtcagaagggaaagaatctgagcccattgatccacagaaaatcttgtaataccacgataggcatttccaaattcttccagacttacagatccacacaggcggagaagctggtctaatacaggtccttctaactgcatcagaaaacggtggtgcttttttcctgtacctgcagggcaggttttatggatctggttctggtctaccaggatagccatatgttcctgcaaatgataggtatcctgttctacgaaataaaaacgttccccttctatgagaaaatataattccaggctttcatgaaaatggcgtgtgaccatggaaaaactgtggctgcggatggcttcttcaacgaaaatgccgggaatttcccctttaaataaaatttcagatgcgtcaggtatttcactgaaagaaagataaagtgtgtcctgttccataatgataagtgctcctgttcctgctgcgcctattatagcatagagttgcatttaaaagtagccgataagataaaaactacaaaaatatatctgattttgttagcgattttacatattttattctaaaatgagacacataaaaggacctacataaaggacacatattgtaacaggaggcagcgtatatgaagtacagtaaaggaaaagtttctgatattcagattgcatacattggaggaggttccagaggatgggcgtggacatttatgacggatctggcactggaagacgagatcagcggaaccatccgtttatatgacattgacaggaaagcagcacagaccaatgaagtgatcggcaatcacctgatgaaccgaccggaggcaaagggagactggaagtttgaggtaaaggacagtttgaaagaagttcttacaggctgtgattttgcagtgatctctattttaccgggaacttttgatgagatggcttccgatgtacatctgccggagcgccttggtatttatcagtcagtaggtgatacagcaggcccaggcgggatcataagagggctgcgcacgatccctatgtttgtagagatcgcagaggcgatcaaaaaatatgctcctgattgctgggtgatcaattataccaatcctatgtccctgtgtgtgaaaacactgtatcatgtatttccgcagatcaaggcatttggctgctgccatgaggtatttggtacccagaaggttttaagggggatctacgaagaagaaacaggagacaagattgcagactggcatgatattcatgtaaatgtagtggggatcaaccatttcacctggtttacggaggcaagttataaaggagttgacttattccctgtatacaagaattatatagatcatcattttgaagaaggttatcagctggaaggtgaaaactggatgaattcttcttttaaatgcgccaatcgtgtaaaaatggatcttttttgcaggtatgggctgatcgcagcagcaggagaccgtcatctggcggaatttatgcctggaaatgagtatctgaatgatccggaaacagttgcttcctggaagttcggtctgacaacagtagactggagaaaagaagatctgaagaaacgtctggagagaagtcacagactggcagcaggagaagaggagatcgatctgacgccaacaggagaagagggaattcttctgatcaaggcactgtgtggactgggacgtgtagtcagcaatgtaaatatcccaaatacagccggtcagatcccaaatcttccggaaaatgccctggtagagacaaacgccctgtttgacagagacagtatccatccggtggctgcagggaaagtacctgaaaatgtaaaagccctgctgatgcctcacattgaaaaccatgagaggaccttaaaggcagcacttacctgtgatgaagaactggtagtacaggctttcctgcatgaccctgttgtaaagggaaagcagcctcaggaggcacaggtgcgcagcctggtacatgatatgatcgaaaacaccagaaaatatctgccagacggctggaattaaatatagaaaataagtttttgaatgtttcggatatatcgtttacagaacggcagccagacctgtaagagacagatctggctgccggatcctgttaccaggaaaggatctcgtatccatcctctgtgatcagaacctggatctcccactgggcggaaggcataccgtcatctgtatagatggtccagtcattttccgcgtcaacgaagatatctgctttccccatattgatcataggttcaatggtaaagatcatacccggaaccataagcatctctgttccttttttagaaacaaaacttacccatggatcttcgtggaattccaggcctacgccgtgaccgccgatctcccggacaacggtataaccgtttgcagtagcatagtcgttgatggcctgacccatatcacctaagtgtccccatggccgtacctgttttaaaccttcttcgatcgcctgtttggttacctctaccagacgcttcttttcaggggagacttcaccgatacagaacattctggaagagtcggagtagtatcctttataaatagtagaaacgtctacattaatgatatcaccatcttttaagatcacatcagcagaagggataccatggcatacctgatcgtttacagaggtgcagacgctctttggaaatccttcatagtttaagggagccggaattccgcctctgtgagtagtctgttcgtaaacccacagatcgatctgctcggttgagatgccggcacagatatgttctgcaacataatccaaaacagacacattgatctttgcgctttcgcggattgctgcgatctgctccggatttttgatcatggcatgacttggtaccttggaacctttgtgacggtattctgacagttttacgtcaaaatccatatggcaatttttatatttatgtccgctgccgcaccagcagggatcatttcttcctattttctgcatgatattctcctttacctggcttcctgcaaatttagatctctatagactggaacaggaaagcactgcgtatcaagtatagcacagcaggggacacaatgccatagggggattgagaattattcccttgtacggggcagagatctgtgttttaggaagatatcgttttctttagtctcaggggaaggaggcgtaaaagcaaggatgttttccgggctgcagcctaaaatgatacaaagatcattgatggtgctggtacttaatggtcggtttttcctcaaacggtcaatggtagcactggagatggaataatcatggatcagcgaataagtagattctccgctggctttcagtgtttcccagaagggctgatagtttatcataaaggtcctttctgttattgttatagtagtttattttatttttgtatgtttgacattgttgctgtatttttacctataaataataaacgtaagagaatgtaaaaaatccccgtccttctgtaaaaaaatgaaaaaatcttgcatttttgtaaaacttatgtataatggggttcggaggaagagtaccatgaaattaagaagagttttaggtagttttgcctgggtggccctggcagctgcgctgatccttgtaaatgcagcggcagccaatgcgcaggataaagccgcagaggacggtcagaccgttcagacgatcacagtaaaataagagggacatgagtccgggtacagagtcgcagtgtgcggctctttttttgtactgccaaggcacatcctttttacgccgacaatgggcatttccgccatgaggaagtttgttgcagcaggctgagatcgggatttttcacagtttacatagaaaacgcaacttttgcaatgatattgacaaaaattcatatggaaaataaaaaaatatgtggtagaatagagacagagttaagaagtaatatattagtataacagtaatataaaaccaaaacaggagggtatcattatgcatttactggacagcgaactgaaaaacaaagaacagtgggagaaggctgagatcagtcttccacagtttgaccgtcaggctatgaaggaagagacaaagaagaacccacagtgggtacactttggcgcaggtaatattttccgcgcattcccagctgcattacagcagaaactgttaaatgaaggaattgaaaaaacaggtatcatcgtagcagagggttatgattatgagatcatcaagaaagcataccgtccacaggatgatttaagccttttagttaccttaaaggcaaacggaaccattgaaaagaccgtgatcggaagccttgcagagtcactgactgtagaccgtcatgacgcagcagactggaaccgtttaaaagagatcttcgcaagcaatacccttcagatggtaagctttaccattactgaaaagggctacagtatcacttctcctgacggtgcattccgcgcagatgtaaaggctgattttgaggcaggtcctgaaaatgcagacagctacatcggtaagctggcagcattatgctactggagatatacccagggcgcagctccactggcactggtaagtatggacaactgctcccacaacggagataagctgttcgcagcagtagatgcttatgcaaaagcatggactgagaacggaaaagcagagaagggcttcttagagtacattgagaaccctgcaaaggtttccttcccttggagcatgatcgataagatcaccccacgtcctgacgcaagcgtaaagaagatgttagaggatgctggctttactgatacagaaagcattgtaacaagcaagaatacctacgtagcacctttcgtaaacgcagaagaggctcagtaccttgtaattgaaaatgcatttccaaacggccgcccggcattagagaatgcaggtgttatgttcacctctagagagacagtagaaaaagtagagcgcatgaaagtatgcacctgcttaaatcctctgcacactgcactggctgtatatggctgcctgttaggttacaccaagatcagcgatgagatgaaggatgctgacctggttaaactggttgagatcattggatacaaagagggacttccggttgttacagatcctggaattctttctccaaagaagtttattgatgaagtacttcagatccgtgtaccaaacccatttatgcctgatactccacagagaattgcctgcgatacttcccagaagctgtccatccgctttggtgagaccattaaggaatacatggcaagctctgaactggatgtaaaatccttaaagttcatcccaatggtacaggctggatggtgccgttatctgttaggtgtagatgatgaactgaacgcatttacagtaagcccggatccaatgtatgaggaactggctggcaagctggcaggcgtaaaggtaggagagtcctgcgacgtacatgctgttctttccccaatcttaagtgatgcaaagatcttcggtgtaaacttatatgaggcaggtcttggcgaatatgtagaaagcatcttcgcagaactgatcgctggaaagggcgctgtaagagagactttaaagagacatctggctgaggcataagatagggcttacctgcatcaacaggtaaataaaagtttgtgttataaataggttaaaactggccgtggcagaaatgttgcggccttttttgctgccatgcatctgaaagaagcgccttttatattcccaagacatgtgttatactagcagggaaacatatgtacggacagaaggagtataaccatgaacaggatcccacagcctggaactttttacaggcattttaaaaataaattatatcaggtcattgcagtggccactcattcagaaacaggagagaaaatggtggtctatcaggctctctatggggattaccaggtgtatgtaagaccgttggagatgtttataagcccggtagaccgggaaaaatatccggatgtggagcaggaataccgttttgagcaggtatttccaggacagatgaatgaactgggaaaaaatggaaataagccggccaccggcaatctggcagaatatgatcagacccagcaaccagaagaacagatgagccacgaatggctggaacgttttctggacgctgaccgcccggaagatcagctggctgtattaaaacagatggaaggccatgtaacacagaaagaactggactgtatctttctgtctttggacctgcagccggaaacaggaaagacaaaaacagagcaggtaatggatctgcgccgccatatacagctgctgcgccggtatgacggcagcagactgcgctgatggttaaaatgaggtgaacgaatgctatttgatctggaagaagaactgaaaaagctgcctgcaagccccggtgtatatctgatgcacaataaccgggatgagatcatttatgtaggcaaggccatcagtttgaaaaatcgtgtacgccagtattttcagagcagccgcaataaaacagccaagatccagcagatggtatcccatattgcatggtttgaatatatcctgacagactctgagttggaggcgctggtcttagagtgcaatttaataaaggaacaccgtccgcgatataataccatgttaaaggatgataagacctatccttatatcaaggcaacgatctgggaagattttccaaggcttctgttttcaagagatatgaaaaaggatggcaggagccgctattttggtccttataccagtgccggggctgtaaaagacagcctggagctgatccataaattataccgcatccgcacctgcaaccgcagtctgccaaaagatacgggaaaagagcggccctgtttaaattatcacatccatcagtgcgatgctccctgccagggatatatttcaaaagaagagtaccaggagtctttcaaaggggcactggactttttagggggccattatgaacccttactgaaatctctggaagataaaatgtatgatgcttctgaaaaaatggagtttgaaaaggccattgaatacagagaacttttaaacagtgtaaaacaggtggcccagaagcagaaaatcaccagcagcggcagggaagacagggatattgtggctatggcaagagccatggaagatgtggtggtccaggtgttctttatcagggaaggaaagatgatcggcagggaccatttttacatccaggcgggaatggcagaagaaaaaggagagatcatcagcgggtttgtaaaacagttttatgcaggaactccttttatcccaagagaagtgtggctccagtatcccattgaagacgaggagatcatcagccagtggttatcccagaaaaagggacagaaagtaaaactggtggttccgcagaaaggagataaagagcggctggttgaactggcggccagaaatgcagctctggtactgacacaggacgaggaaaagatcaaacgggaagaactgcgtaccataggtgccatgaaccaggtgggaagctggatcgggttagaagggatccgcagagtggaagcatacgatatttccaataccagtggtgtagagtcggtaggttctatggtggtctatgaagacggaaagccaaagcgcagcgattaccgcaagtttaagatacgtactgtccagggccccaatgattatgcgtccatggaagaggtgcttacacgccgtttctcccatggaatacaggaaagtgaaaacttacgtgaaaagggaaaggatatttcctatggaagttttacccgctttccggatctgatcatgatggatggcggacggggacaggtaaatattgccctggcagtccttgatcgtctggggctttcgatccctgtgtgcggtatggtaaaggatgataaccacaggaccagaggactttattataataacgtagagatccccattgaccgtcacagcgaaggcttccggctgatcacacggatccaggatgaggcccaccgctttgccattgaatatcacagaagcctgcggggaaaagcccaggtaaggtctgttttagatgatatagagggcatcgggccaaccaggagaaaagcccttatgcgccattttaaggatatagacaccatacgcagtgccactgcagaagaattagagcaggtgcctcagatgaaccggaaagcagcggagtctgtgtatcatttctttcataagccggaaaagatacaggaggacaatgcccaggctggtgccggaaacgaaaatacatgacaataaccttaaaatgtgttagtataggaataaataattggtgaatattggaaaaatcaaaagtacaataaagtagaataatcacataagggggaaaccattatgcatggagttactattacagagctgatcgagaaaatgaacctgcgaaattccacaccgcagatcgatacagacaagatcgtgctgacccacccggatgtaaaccgtccggcactgcagctgaccggatttttcgatcattttgacagagaacgtgtacagatcattggatatgtagagcaggcatatattaagactatggagcgtgatgtaaagcgtcagatgtttgataagcttacttccagccagattccatgtctggtattcagcagaagccaggagccggatgacgatctccttgagtactgcaattactacggcgttccatgtcttgtctctgataagactacttcttccctgatggcagaggtgatccgctggttaaatgtaaagctggcaccatgtatcagtatccacggtgtactccttgacgtatttggtgaaggtgttctgatcatgggcgagagcggtattggtaaaagcgaggcagctctggagctgatcaagcgcggacaccgtcttgttaccgatgacgtagtagagatccgcaaggtcagcgatgatacactgatcggaagcgcaccggatatcaccagacattttattgaacttcgcggtattggtattatcgacgtaaagacactgtatggtgttgaaagtgttaaggatacccagtctattgatatggtcatcaaattagaagactggaataaggataaagaatatgaccggctgggactggaagaccagtatacagaatttttaggcaacaaggtagtctgccataccatcccgatccgtccgggacgtaaccttgccattatcgtagagtctgcagcagttaactaccgtcagaagaagatgggctacaatgcggcacaggaactgtacaaccgtgtacaggccaatttaaagggaatgtctccgtcaaaataggcagcaaagaagagtaaacgagtaagagaggaataagaccccatgtcagagttttgtgaaaagctggaagaaaagctgaaggaagttatgacttcagagagaggaaacttccgctttatggagcctatgaaacggcacactactttccgcattggaggaccggcagctgtatttatcagtcccggttccgaagaagagctgagagaggttctgaacctgttaaaagaagaaaatatcccctggaccatcctgggaaatggaagcaacctgttagtcagtgatgaaggctttaagggagctgttatttccatgtctgaaggctgggcctattccggcgtattaagagaggatgagaaagcgggaaagacccttataagagcaggagcaggagagcttttaagccgtaccgcaagactggctatggagtgttctcttacaggaatggaatttgcttccggtattcccggtaccattggcggtgccctggtgatgaatgcaggtgcctatggctcagagatctgtaatgtcttatccagagcaaaggttatgacaacagagggtgagatcctggaacttcctgcagaggaactggaactgggataccgcaccagctgtatcccgaagaaaaattatattgtattagaagctgtgtttgaactgaacaagggaagcaaagaagccatcagcagccagatgcgggaactggcaggaaaacgcagggaaaaacagcccttagaatacccaagtgcaggcagtacctttaagagaccagagggatattttgccgcaaagctgatcgaggatgccggtttaaagggcttctcagtaggcggtgccatggtttccgaaaagcacagcggttttgtgatcaattacaatgatgccacagcaagtgatgtaatggaactttgcagacaggtaagagaaaaagtcaaagccttaagcggggtcgagctggaaatggaagtaaaaaggctgggagaattcaaatgaaacttgtgatcgtaaccggaatgagcggggcaggaaagactattgccttaaaaatgttggaggatatcggtttttactgtgtggacaacctgccaatctctctggtggataaatttgtacagcttgtatcagaaggtaccagtattgaaaaagcagctttaggtctggatatacgaagcggggaagagttgggaaatctggatgagatcctggaaaactggcgcagaagcaatgtggatgtacaggtacttttcttggatgccaatgacgcagtccttattaaacgttataaagagactcgccgtacccatcctcttgcaggtgcgggaagactggaaaacggcattgaaaaagaacgggaaaaactggcatttttaaagagagaagcagattatatcattgataccagcatgctccttaccagggaactgcgaaaagaactggaaaagatcttcttacaggatgccagatataaaaacatgtatgttacggttctttctttcggctttaaatacggaataccggaagatgcagacctggtatttgatgtgcgtttccttccaaatccatattatgatgaacacttacggcctcttacaggtcaggtgcaggcagtacgggactatgtgatgcagggcggaacagcggatgcttttttaaagaaactgtatgacatgatcgatttccttctgccaaactacataaatgaaggaaagaaccagttagtgattgctgtgggctgtacagggggaaaacaccgttccgttaccattgcaagagctttgtatgagcatctggaggcagtcggggaatacgggatccgtatcgatcacagagatattgataaagacaacaagaaggcatagagcatttgatttgatgcagcagtgaggtaaaaatgtcattttcttccacagtaaaagaggaactgtccaggcagcttaccactgccagacattgccagatcgcggaaatggcggctatcttaagcctttgcggacgggtgaagatatcggcatccgaccactttgccattgccatccatacagaaaatctggcagttgcaagaaaatactttacattattgaaaaaaacatttaatataaatactgatgttttgatccgtcagggcctgttaccggcccggagcaggacttacgttgtagcagtgagagaacatgaagatgctcttcgtgttttacaggcagcgaaattactggatgcaaatggtgagatcgcagaagacctgtctttagtccacaacgtgatcgtgcagaacacctgttgcagacgggcgttcatccggggagcttttcttgcagcaggttctatcagtgatccggagaagttttatcactttgagatcacctgtgcgtctatggggaaggcaaagcagcttcagggacttatggcgtcatttggtattgatgccaggatcgtattacgcaagcgttattttgtggtatatgtaaaagaaggcagccagatcgttgacctcttaaatatcatggaagcaccggtcgctttaatggaactggagaatatacggatcgtaaaagaaatgcgcaacacagtaaaccgtaaagtaaactgtgagaccgcaaacatcaacaaaacagtttctgcggcggtgaagcagatggaagatatccgctatatatgtgacacagtggggcttgaatctcttccggataatttaaaggaaatggctaaaatgcgcctggaacggccggaagccactttaaaagaactgggagaagctctggaaccgcctgtaggaaaatccggtgttaatcacagactgagaaaattaagtctcatagcacaggatatccgcgaaaggtcttaaacaaggtacctggatgggaagatcccattggcaggaatgaggaggataattatggtcaagaaatctattaaaattgagttgtcttcaggtctggaagcacgtccggcagctatgctggtacaggttgcaagtcagtatgacagcaagatctacctggaagctgattctaagcgtgtaaatgcaaagagtattatgggtatgatgactcttggtctggtaaccggtgagtccattaccgtagaggcagatggtactgacgaggagcaggctgttgctgagatcgagaagtacctgcaaaatcagtaaagagtgtgggagagacaacacttttatagtacgatataaacaggcaaaagaggctgctgtggacgggcggtctctttttaaattttagaagtatttcacaaaggagggtttatggcatttacgcatctgcatgtccatacagaatacagtcttttggacggctcttccaagatcagagagctgactgccagggcaaaagagctgggaatggacagcatggcaatcactgatcacggcgttatgtacggcgtcatcgacttttaccgggctgccagggaagtggggatcaaacccatccttggctgtgaggtctatgtggctcccggttcccgttttgacagggaaaatggtgccggcgaggaccggtattaccacctgatccttttggcggaaaataatacaggctataaaaacctgatgaagatcgtttccaagggctttgtagacggtttttattataagccaagagtggacttagaccttttagaaacttaccatgaaggcattatctcattaagcgcctgccttgcaggtgaggtacagaaatacctggcaagaggcatgtatgaagaggcgaagcggtctgctttaagatattctgagatctttgggaaagaccatttttatctggaacttcaggatcatggtataccggagcagaaaatggtaaatcagggactgctgcgcctttctcaggagacggggctggaactggtggctaccaacgacgttcattatacctttgcggaagatgccaaggcccatgacattttattgtgtatccagacaggcaaaaaggtaacagatgaggatcgcatgcgctatgaaggaggacagtattactgcaaatccgaagaagagatgcgaaagctgttcccttatgcacaggaagccattgacaatactcataagattgcagagcggtgtaatgtggagatcgagtttggtgttaccaagctgccaaaatatgaggtaccggaaggttttgactcctggacttatttgaaccacttatgccgggagggctttaagacccgttatccggatgatgacggcacgttaagccgccgtctggattatgaattaggtgttatcaaaaccatgggctatgtggattatttcctgatcgtatgggattttatcaattatgcccgttcccagaatattatggtgggaccagggcgtggttctgcggcaggaagtatcgtttcttatacgcttggcattaccaatattgacccggtgcgttataacctgctctttgagcgtttcttaaatccggagcgagtgtccatgcctgatattgacgtggatttctgctacgagcgcagacaggaagtcattgactacgttgtgcgcaaatacggcaaggaccaggtggtacagatcgtcacttttggtacactggcagcaaaaggtgtagtccgtgacgtaggccgtgtgctggatctgccttatgccatgtgcgactccattgcgaaaatgatccccaatgacctgggaatgaccttggataaggctcttacggccaatccggatctaaagaagctttataatgaggatgagcaggtaaaatatcttatcgatatgtcaaaacgtctggaaggactgccaagacatacctccatgcatgcggcaggcgttgtgatcggcagccgttctattgatgagtttgtgcctctttccagggcagcagacggaactattaccacccagtttaccatgacgaccattgaagagctgggattgttgaaaatggacttcctgggccttcgtacactgacggtgatccagaatgcagtgcgtctggcagaaaaagactacggcataaagctggatatggatcatattgattacaatgataaaaaggtactggagtctattggtacaggccgtacagaaggcgtgttccagcttgaaagcggcggtatgaaagggttcatgaaggaattgaagccggagaacctggaagatatcattgccggtatctccctgtaccgtccgggcccaatggattttatcccacgctatttaaagggtaaaaatgataagacctctattacctatgagtgccctcagctggagcccatcttaagcccgacctatggctgtatcgtttaccaggagcaggttatgcagatcgtccgtgacctggctggctataccatgggccgaagcgatctggtgcgccgtgccatgagtaagaaaaagacggctgtcatggaaaaagagcgtcagaacttcgtttatggaaatgaggcagagggagtaaagggctgtatcgccaatgggattgatgaaaagacggcaaaccatatttacgatgagatgatcgattttgcaaaatatgcatttaataagtctcatgctgcagcttatgctgtggtttcttatcagacggcttatttaaaatattattatccaaaagaatttatggcagcacttatgtcttctgttatggataatgtaagcaaattttcggaatatatcttaacctgccgccgtatgatggatattgccatcctgccgccggatatcaacgaaggagaaagcggcttctctgtatcaggagatggtatccgctatggactttctgcgatcaaaagcgtgggaaggccggtcgtagacgcaatcctggaagaacggaagaaaaacggtattttcagttccatggaagattttatcaaccgtatgaccaacaaagaggtgaaccgccgtaccattgaaaactttattaagtccggagctatggactctcttcctggcaccagacggcagaaggtggcagtggcgccgatccttcttgacaataaagcaagggagcgtaaaaacgcctgggaaggccagatgagtctgtttgacctggtatcagaggaagagaaaaaggaatatcaggtatctttcccggatgtgggagagtattccaaggaagagctgctggcttttgaaaaggatattctgggcgtatacatcagcggtcatccattagatgattatgaaggtctctggagaaagaatatcactgccacatctgctgattttattgtagatgaagagacagaagaagcagtggtaaaagatggcatgaaggtggtaataggcggtctggtggccggaaaagtggtaaagaccacaaggagcaaccagctgatggcatttatcacactggaagatctgatgggctctgtggaagtgatcgtttttccgaaaaattacgaagcggaccgggatgttttaacagaagactccaagatctttatcaagggcagagtgtccttaggagatgaaccggtgggcaaactggtatgcgagcaggtgatcccattttcaaaggttccaagacagctgtggctgcagtttgaagataaagaaatatatcaggccatggaaggggaaattttaggcattttaaaagaaagtgaaggcccggacagcgtagttatctatttaaagaaggagcgggcaaagaaaatactgcctgcaaactggaaagtagaggctgcaggggagctgatggaaacattgatttgtaaacttggtgaaaaaaatgtcaagcttgtagaaaaaaacttgattaatctgggaaaatgaattagaatagcgttgtgtatttatttaagaacagaagcaacgcacatcagacctggagatgtgcttaaaacaaggaggtagattggtatggcaaagtcagtaaagaccattggagtattaaccagcggaggtgatgctcctggaatgaacgcggccattcgtgcggttgtaagaggcgcgatcaataagggcctgaaagtaaaaggtattatgagaggatatgccggacttttggatgaagagatcgtggatatggatactaccagtgtatctgatattattaaccggggcggtaccattctttatacagcaagatgtatggaatttacaaaaccggaaggacaggagagaggcgcagagatctgccgcaagcataacattgacggtatcgtagtcatcggcggtgacggatctttccgtggtgcaggaaaactttctgcactgggcatcaacaccatcggacttcctggaaccattgacctggatattgcatgcacggattataccatcggctttgatacagctgtaaacacagctatggaagccattgataagatccgtgatacatctacctcccacgaacgctgcagtatcgttgaggttatgggccgtaatgcaggttatatcgcgttatggtgcggtattgcaaacggggccgaggatattcttcttccggagcgctatgacggcgacgagcaggctcttatcaaccgtattatcgaaaaccgtaagagaggtaagaaacataacatcatcatcaatgcagagggcatcggacattccggttccatggcaaagcgtattgaagcagcaaccggtatcgagacccgtgctaccattttaggccacatgcagcgtggcggtacacctacctgtaaggaccgtgtatacgcatctattatgggtgcaagagcggcagaactgttagcagaaggaaagagcaaccgtctggtagcttacaagcatggtgagtttgtagattacgatattcaggaagcactgaatatgaagaaggatattcctgaagaacagtatgagatcgcaaagctgctggcaagataatacttgtctggtctgccagctgtatgataagaatacaaagtccgccgttaccggcatctgccggtgcagcggactttcatgtgtttcataagccattaacgaacaaaccgcctgcgtaaacaggcagtagagcacgtcagtgcgggtttgtgagtgtggtggggtgatgtatagaaaggaaagaaaatatgacagataaagtagtgctctgcggagccaattcctatgagcagaaatactatttcaacgaggaattccagtccctgcctcagtctgtaaaagatgaactgcacattatgtgcgttctttttacagaagatgtaggcggtatccttactatggaatacgatgaaaagggaaatctggattttcaggtcatctctgaagagggagattatctctttgatgagatcggaagtgtattaaagatcaaggagtaccaggagacaaagaaagagcttctggaagcgttggagctttattacagaaccttctttttaggggaaaatgtagactgggaagaggaaaaagaggaccaggaaggcgacgataagggagaaacagatgaagtttaagatcggtgatacccttttagataacaacgtatttctggcacctatggcaggtgtgacagatctgcctttccgccttttatgcagggaacagggtgcaggcatgtcagtgacagaaatggtcagtgccaaggctattttatacaaaaacaaaaacacaaaagaacttctggcagtagaccgggcagaaggtcctgtttctgtacagctgtttggctccgatccggagatcatggcagcgatcgcagcccagatcgaggacgggccctatgttgccattgatgtaaatatgggatgcccggtgccaaagatcgtcaacaatcacgaaggttctgccctgatgaaagatccggcccaggcagaaaaagtgcttactgctatggtaaaggcagtgaaaaagccggtgactgtaaaattccgtaaaggctttaatgaccagaacattaatgccgttgagtttgcaaaaatggcagaaagctgcggcgtagcagctgtggcagtccatggccgcaccagggaacagtattattccggaaaggcagactgggatattatccgccaggtaaaagaggcggtaaagataccggtgatcggaaacggggatgtatttacacctgaggatgcaaaacgactgttagatgaaaccggctgtgatggtattatggtaggcagaggagccaagggaaatccctggatctttaaacgcattacccattatttggaaacaggtgaactgctgccgggacctacccttatggaagtacgggatatgatcctgcgccatggaaagatgctcacagagtacaagggcgagatgatcgccatgcgtgaaatgcgcagccacatggcctggtacaccaagggaatgcgaaattccgcagccctgcgctgtgagatcaaccaggtagagacattggaaggtctggcagaacttctggaaaagcggatggaagcagaataagagctggtaaaagaaaaataaaaccaggaacaggtaaaaataaaaaagcgttatttagataaaaatataacgaaatgacagcaaagagcaggcaggacagaaggaaagtcttacctgctttctttcttttttagagatataacttattttaatttaatacatgttatgaaaataaagtagaacagcacatgtcttaattaatacaagttatggcggaataaaccaaaggaaaatagaaaaaatagggggtttttagaaaaatgtgcctaaaaaataaagaaaaacttgtagaaaagttaaaaaaatctaaaatatacttgacttattttaatacatggtgtatggttattacaccatacagttgcagacaggagaggaggcaacactgtgaataaattatcaaataaacctttatatgatcaggtgtttgaccagatcaaagatatgatacgcagtggtacctactgcgccggggatcagcttcccagcgaaaaagaactgatggaacgtatgggagtcagcagagtaactgtccgccaggcacttcgccttttagctgatgcaggtattattgagacccgcaaaggaaagggaagtatcgtcagcgttgactggaaaaatttgctggatcccggagagttaaaagaccaggcagaaaaatactggcgtcaatttgaactctccacaaaggccagaaggctcatcgaacctgctattgcaaagcaggcggcgtttatggctacaccggaagatattgccagactggagcgtatttacgaaaacgaccaggtggtgatcgaaggcccgaatctgtatgtggaagagggcagaggacttcaatctttccacggctgcttatgggagatcgtaaaaaatcccctgttagagccggtatggaacgcggtagtccttccttccaatgagatccgtacactgcctcttattttccctgtagaccaggagttaaacagagaacaggtacgtatccagcatggaaatattctggaagcagtgaaaaaccatgatggtgaatacgcatattttcatatgttagtccactgcgactggatttataacacatataagcagtattttgatgaattctgcaggtaaactttgataccggattgctacgtgctatgcactctcgcaatccttaaaaatattcgtaatccgctcatttttcttcaaaaaatggctacttactcatgtttttggcgggtcccaagttcaaaaagcctcctgcaagcaagcttgcgtcggtttttcgaccttttgaccctggtatcacatattctttggctgtaattttcccggacagtgcagggcccgtaccgcctggggatttggcattatacaatgaaagtgttgaaaaacacattcagttttacatcattttggaggtgcagtaatgaagtacgattttaacaaagtacaggaccgcattggctctgactccattaagtgggaaaaacagctgaaatttggtacaaagacaggacttcttcctttctggatcgctgatactgactttgcaacattgccggaagcggtagaggcaatgaagaaacgtctggaacatccggttttcggctataccacgacaggagagagaactttggaaacagtaagaggctggtataagcgccgtcatcaggtagatctgcctgtcagtgttttttctccttctgaaggtgttgttacatctatctggttctcaatccgcggctttacacagccgggagacggagttttagtgtttactcctgtatatgacccatttttcgctgtgatcaacaatcagggaagaaaacaggttgactgtccactggtttacagcgaaggccgttacaccattgactgggaagatctggaaaagaaattagccggtggtgatgtaaaggccatgatcttctgcaacccccacaacccggtaggccgtgtatggacagaagatgaggtcagaaatatcgtagaactgtgtaagaaatattccgtatggctgttctctgatgagatccatggagatgtagtcctttacggacatcagtatacttctgctgcacgtttcgctgatgtgtacgatcatatgctggtctacaccgcgatcagcaagacctttaacatggcaggtcttcattcttcctgtaccattattccaaatccggagtacaagaagatccaggaagacactcttcgccaggcatggcttatgagccctaactgcatggcaaacagtgccattgaagcctgctatacatatggtgatgaatgggtagatgaacagaatgcataccttacagaaaatgctgaatttgttaccagctatctgaaagagcatgcaccacagatcaagcctgttaagccagaaggtacttacctgatgtggttagactgcagcgaactttccatgacttccgaggagatcgtaaagatcctggcatctgagtataagatggcagtaggaggaggcgccggatatcagggcaatggagaatatttccttcgctttaatattggctgcccaagagaaactcttgaaaaaggtatggaaatactggcacagtttgtggcagataagaaaggggtataactatggacaacaaaaaactgaatttctgggaatgtatgagtttctgcatcggccagatcgttggttccggcgtattcgtactgaccggtatcgtaatcggactgaccggacacggcgcaccttacggcttcgttcttgcagcactgatcgctgtatgccagctggttccaatggcaactctggcatccagtatgccggcaaccggcggcagctacgtgtatgctaagaaactgatcggaccaagagcatctttcgtattcttaatgatgttcgttcttcagcaggtactgatcgcaaccttcgctattggctttgcaagctatgtagctgttatcttccctgatgtaaatcagaagttagtagcacttggcgcactgactctggcagtagtagtaaacatgatcggccttaagacttctgcaaaagtacagaagttcatggtagcattattacttgtttctctgtttgtatacattgtatttggtcttcctaaggtagactggtctgcactggcattaaacagtgaaaacatcatgccaaacggcccaatgaaattccttcgcggcgctgcaatgctttccttcgcatgtgctggtgcaaagttcttagctgagaacggcggtgaagtagaaaatcctggcaagaccattccaaaggctatggtattatctacactgcttgttgcaattttctatgcattagttggtatcgttgctgcctgcgttcttcctgttgaagaagtagctggtgtaaacatttctgtagtagcaaaatctgtattccctgcacctgtatacctgttcttcgtaatcggtggtgcatggttcgcattactgacaaccttaaatggtaccttatcctggaccacacgttccctgcagagagcagctatggacggatggctgccagaggcctgcgcaaaggaaaataagggcggcacacctgttattctgttattattcttctttgtagttggtatcatcccgatcgtaaccggtatgaacacttctgatattgcaaatatgggtactggttgtggtaagctcactgacctgttaatggtttatgcatgcttccgtctgcctaaggtatttcctgaggaatacaagaaatctgctctgtacatgagccctgcaaagttaaatgtagctttagctgttgtattcgttgtactggcagctacctcctatgtcagcctgtccagcttaaatgcaagacagttcctgtacattggtctgttcatccttgcagcagttgtactgatgttagttcgctataagaacgtaaaagaaaaaatggatcagcagtaagcactgtctgataccgggaaaacgcggtggggtgttgcggcaataacattctcaccgcgttccctgttatgggaggtaagactatgaaatatgcagtagtaggctttggtacagccggctaccatgcagtgaaaaagatccgtgaactggataaagaaggatgcattgatgtatacagcaatacaggtcgtgccccttataatcctatgctgacgacttattatgcttttggaaagctggaatatgagggaatgtttcctttcggcgatctggagcagatacaaaaagaagtggattttaaccttcgcagggaacaggtgatcaaggttcatggatcagaacatctggtagaaacagaaaatggatcagagcagtatgaccgcattctgatcgcaacaggcgcaagggcatttgctcctcctgtaaaaggactggagccagaggatgcatttttaatgcgtacagtagaagatgcccttcgttttaaagacagactaaagaaaaatgatattaaacatgccgttgtgatcggcgcttccatggctggtatcaaggtagtggaagtccttcacaaatatggcatcgagacctggcttttagatctggcaagctatattttccctctggctgcctacaaagaagtagcaaaagagatcgaaaagagagtagaagcccagggcgttcatctgatgtttggggtcaccattgaccatatggaacaggaaaacggggaaaagacagctgttttaacagatggaagccgcattcctgctgatatcgttggcctgtgtattggtacaagagccattacagagaccgttcagggagaagtggagattggaagaggtattgtggtagatgaccatatgcgtacttctgttcccggaatttatgctgcaggtgactgctgtgaaggcaacaacctggaaagcggccagaaccagatcattggtctgtgggccaatgccaatcaccagggtgaaactgccggtatcaacatggcggggggagatatggcctataagggaaatatccttcacaatatcacccattttatgaatatggattttattggttttggagacaaccgtatgcagggagaggtcctagaatacggttctctttcagaagatctgtatatccgccttgtattagacggaaagcgcattgtaggcgctaatattttagacaattatcgtgtcagcggcattattaaaaactatatgctgcggctgtttgctggtgaacagtttgttctgccggattatcagcgggctatgctggtaaaagcgggactttccgttccttttatagatgaagttgaggagaagattcatggatagtttagaggctttaaaaaaagcaaagataccgggaccggagaccggcattgaaaaaaagaatacggtctgtgctatctgttctccggcatacaactgcggtgtatgcgcttatgtaaaagatggaaaaatggtaaaactggaaggtctggatgaacatccaagaaataagggatgtctatgtacaaaaggactttccggccgtggttttgcttacagagaagaccgtatcaagacacctcttcgccgcattggcaaaagaggagaaggaaaatttgaaccgatcacctgggatgaagcctataaggagatcgctgaaaagctaaatcacattaaagagacagatggccctcaggcagtagcatttttcggcggttacaataaatggttccgtccttggctgcgtcgttttgcccattcttttggaactatgaactatggtacagagtccagcacctgtatgacggctggctggatggcatggaaaacagccatcggacagctggcaaagccggatatgccaaactgtgacctgcttcttggctgggcatttaatccttattattccggttacttaaaggctcagggagcagaaaaagcaagagcaagaggtatgaaagtcattgtagtagacccaaagatcacgcctactacagaaaaaatgtgtgatctgcatctgcgtccttatccgggaacagacggcgctttggccctgtgcatgggaaatgtactgatccagaaaggctggatcgataaagaatacattgacaagtatgtacatggttttaaagaatatgcccagtatgcagcaggatttaatgagaccaatgtagaaaagctgacaggcgttccctatgagttagtggtaaaggcctgcgagatgatccatgaaagcaagtccatggccattaacgaaaacagtgcgcctattccacaccacaaaaacggtttccagaattaccgtgccattatggcgctttcagctttgaccggcaattttgaccgcaaaggcggacagctgccgggagaacatacatttactcaccagatcgcaggttttactaccctggaagatgaatttgccgacggcacagagccaaaggatgcagtccttccagtaggagccatcaggttcccgttgtggtatcatatggaacgggagatgcagtgcgtggacctgccaaggcagatccatgagggaacaccttatcctgttaaggcattatttgctctgggcttaaattaccgcattcttccagatgaccagtattttaagtctgccatggagaaactggactttttcgtagatgcagacctgtttatgactgacgctgcaaaaatggcagatattgtccttccggtgtgcacttcctatgaaagaggagagttagagacttatccaggcggctatgcatggctgaccaaacctgccattgacagagtaggagagagcaagtcagacgcagagatcttatgtgaactggcaaaagtaatgaacctgggggataagcgcctggaagaaggctatgagaaaaacattgaggagattttatctaacctggatcttacaatggatgaactgcgttccagtgacctgcctgtaaaagtgcggggggtaaaaccttatgttccgggaacgatccttgaaaaaggctgcaagactccaactggtaaatttgagttatattcagaactgatcgcttctcatccggaatggcacttagatgcccttccaacttattgcgagccaatggatgaagcagatgaaaccgtatatccgtttattctctgctccggcggaagattgcaaaatgctatccattcccgtctccacaaggtaccgtgggtacgcagcctgcgtccggatcctatggcagatatttccatagaagatgcacaggcattgggcttaaaagagggggacgatatagaactgtttacagaaagaggaaccatttccgtaaaagtacatccaacacacagggtgcaaaaaaatgtggtcttcttctatcatggatattcggaagcagatgtaaactccctgatgtccggaacccatgtagacccatattccggtttcccggcttataattctaccagatgtggtatgagaaagaaggtgcagcgatgaagaaatatgcaatagatctggatattaccaagtgtatttcctgcggagcctgctccatcgcctgcatggatcagaacgactttcaggtaaaagaagggcagagacctttcagaaatgtatttgacctggaaatggagcaaaaaggagaggtaaaatacagccacctgtctttagcctgcatgcactgtagcgatgcgccttgcattaccgcctgcccaagcgcctgtctgcgcaaagatccggagaccaaccttacagtttacgataccactaactgtatcggctgtcacagctgcgctatggcatgtccttatggtatcccttcctttggggaaaatggcaagatgattaaatgtgacggctgctatgtaagagtccatcacggaatgcttccggcctgcgtaaaagcctgtccggtaaaggcgctgcaattagtagatacagaagccaaagaaccgcagatcccaccggaacattctttaaggatgacaagtgcgggaatgttgaagcagcaggtgtaagtaaaaataactgcatccataagccagaacctattttacatgtgagaaaaagatttgttataatgatactgtcgcagattaggcatttttgtctggtctgtggcagtatttttattgccatggatttgaaaaatggaaaatattgtaaaaataaacaggagaaggtcatatggaaaaagctctgaaaaagagagaagcccaggcagttgtgatcgaagaaatgagaaggaccggaaagatcattccaaggatcggaaagacgaaaagtccacttacccattgacaaagtaggaattaaaagatatgataagcgcaaagaaaacggagtgaaaggacatctacggtatgacaagatcacagatccgaaaatatgcgtttatcaaatccattcccattatgtgcagctatatttttgtcagtatggcttatggtattatgatggaagatgcaggttttaagtggtattattctttgctggtgagcctgaccgtgtatacaggcgccttccagtttgtgctgatcacatttttaagcagcggagtttctattataacagtggctctcacagcactgctgatgaacagccgccagagtttttacagccttacgttcctggaagattttaagaaaatgggaaaacggatgctttatatgatccataccatgacagatgagacctatgccgtaaactgtacgctggaactgccacagaaagaaaaagaggataccatgttcctggtggcatttttcagccgttgttactggatgatcggttctgttttaggcggaatgttaggacagctgatcccgtgggatatggaaggcattgatttctgcatgacagccctgtttgtgatcatttttattgaccagtgggagaaggcagacagacatacaccggctttagctggtcttgggatcggcattatctgcctgatcatatttggggcttccggttttatgcttccggcacttttacttacatcaggattattagtggtgttacagaagagaaaggaggaagtatagatgagtacagaaagaatattgatcatgatcgcagtttctgctctttgtaccttctttttgagggctcttccgtttctggctttcggcggatcacagaagatgccggactggctggaccgattgggaaaaacacttccctcagcgatcatggcagtgctgatcgtctactgtttgaaagatgtgggaagtgatgtggtacatatcggacttccaaagatagcagcggtagtgatcgtagcgttgtcttataaatggaagcataatacattagtaagtattgcagtaggaacggccggatatatgatccttcttcgagtggcagctatgttgtaagattcatgcatctggcggaacagagaatgtatacatattggaaaaacatatagaaagagcatataaaaaagcggtgcaggaagcatatccaaatgatatgtatccatgcatcgctttttgctttttatgatcttccttccaactacaggaagaagatttttcgctttataggaaagaccgccgccggcgctcttttgaattaaaaatgcccgccgataggcgggcaacacaaatagacgatctagggattaaaaaagataaaaaccttcctcaccaaattctttatcaagatcgtcatcatttagaaaataatccatatccagcaggtcttcctcgctcatatggcgaatgtccgtggaagtaagtccttctggaggattatccatgtattttttacgcagcgcctcaacatctgttttcattgcaatgccctcctatgagggaattataccataaaaacagagaaagttatgcagaagaacgctttccgcgagatcgggacatagatctctcatataattcttcgagggaaagacgctgatggttaaaataaagttccaaaaactccattttatgcctgcagatgggacattccagcggatcataaccaaaagaagaaagaatagcattccgccaatggttaaagttgcgtagaatgggacgtttctgtttggaaatgactttatggagctgctggtctgttttgcggtggcgtgcatacaagccgccatagcggatcattttaaaatgtttctcagggatatgccggatcagacgtttgatgaagtccataaccgggatcgtttcctgtatatatttatcatcttcgtgtcgattgtaatgaaaagtgaccatagaaccatcatatttgtcgatcctggaagtggcgatcacaggacgccccagatagcgtccgatatatttgatggcagtctcaggatcacaagaggaaggcttggcataaacgtaaaatcccttcttatgagaagaataacagagggatttgatctgtttgaaaggatcgcccagccgttggtgcatctcattaaggagagcggtacggaaagcagaacgtaaaaaagagtaattgaagtgatggacatttcgccaaaggccgtcatcactgagaccgccttcagaaataaggcagtggatatgaggattccatttcagatcccgtccgaaggtatgtaagaccatgataaaaccaggcgtaaaattttttgatttgttaagttcaaaaaacatgcgggaaatgacactggcaacggaatggaacaggcaatccaaaagggagcgttcttttaggaaaaaatccctgagattttcatcaatggtaaagacgcaatggcgatgcttaacgttgatgagtttgaaagtcatagaagtggtgcgttccatgctgtatttgtttccacaagaagggcaaaaccgactgtgacagtggaaagggacatatttaaagttgccacaatgggggcaatgatacatggcaccgccaaaggaaggatccccacaatggatcatcttttcgatattttccatttcggtgtctctgggatggagagtatattttatttcttcataatggtctgtaaaaattttctgcaagatattcataagactattatgagatagattttagaaaaaagaaacccctaacccctcaagattgaggggcaggggagttgaataggcgaagcctattttttatatttaatttaattcctcttggaagtgatcaactctccggaagtgtttccatgacagatcggcttccattctactttcttaaccagtgcaactgcagagatcgggatgtaagtgaacatgaagatcgggaatgtaaatgtataaaggatcttctttaatgcagacaactgcacctgtttccactcactgatcatggtgatggcaccataaaccagcagacttaagtagaacataacaatggtccttgtaaggaaggaaatattctcagctgcgatcattcttgctatgtaaccaggttctgtcatataggaaaatgccatgcccaggttaataaggatagcggcaagagtaaagaacataccaggtgctacggtcatgaaaatatcatagcaggaaaatgattttcttccgccctggaaaaatcccttgatcagtctccagctgtaatgccagtcaacctgataaaatcctttggaccaacgcagtctctgggtccaggactgaccaaattttaaaggctgctcatcgtagatcacagccttatcacagtagccgatgaccttgccttcaatggcacagttaacggaaaattcaatatcctctgtaagaagatggaatggccagccgccgttttcgcggatcacttcaccggataccagaaagccggttccggaaatagcacagttggttcccagaagcattcttgggaagtttaagaaacgggcctcccgcaggaaccataagccgtaaccagctgagatccagttggcaccgaagttcttggaattacggtagcttgtaagagcagcaaaatgtccgctgtcaaaggtggcattcatttctttgacaaaatcaggatctacataattatctgcatcaaatacaaagtagccgtcatatacatctttaccggaggcagaaagacatttgaacagatagtcaagggcataacctttgcccacctgctgatggttgtaacggcggtacacccttgctcctgcctgtgcagcaacctgcgcggtattatctgtgcagttatctgcgatcacataaatgtcaagaaggtcagatggataattctgagcctttaaactggcaatcagaccaccgatgacatttgcttcatttcttgcagaaataacagcagcgtaacggtgaaactgatgggaaccggttttatttttcctgtgtttcataagaagccccaggagcagataaccgatctgataaaaataaaagactacaaatacagttgcgatcacaaaattaaaataatggatcatctgaagtgttttcataatatacctctttgtaatacttgaaatatttgacaaattaataatatttctgattttagcgtgatctttttcgcagaatacaaaatagcatattttaagaataatgcaagtcttgacaaagaaattcataaaaaattaataattgcttcatacaatattcaattatgaacggtattaaaaagacttcctaaaaattcatttaaggtgtcgcaaaacaaaaaaagatgtggtatactaaattgatagcattgggaagaagaaaaaggagtgctttatgctgaatgaagaaaaaatccaggcaatgacagatctggcagtgtttgaaaagcatcagggcagaaaaatcttccctgtaaatcaatactttaaaagtgattatgtaggagggcagttgttccgttcttttttcgggtacacctttagttttgcgctgatccttcttatgtggatcctttataaactggatgtgctcatgaagggagctgatattgatcagctgatcggctggatccgcaactggggactggcctatgtgaccggactggggggatatcttcttattacatggaagatctattccagacggtatgattttgcatccagaagccagaccatgtatgtggccaggcttaaacatctggaccgtaaatttggaaaggaccggggaaaagagaacagaggaggagccgctttatgacagttcttttgctgtggaaagagcacctgaaagaaatttataataaatacagctatgtgatccgctttgtggtccgtctgctgttgatcctgtgtacgatcttaagtatgaatgccaatatcggctatatggcaaaattgaaaaatccggtcgttgtagcgctgctgtgcttttttggagccttgcttccggacagcggggccgtcttccttataggatgtgtgatggtagcacatgtgtatgcagtatccatggaaatggcactgatcacactgatgatgatcctggtagtggctgttctttattatgggtttaagccgggagacagctggcttatgatactgacaccccttgccttcttatttaaggtgccttatgcggttgcttttttagtagggctgggaggcagtcttatttctgtaatacctgtaagctgcggagtctttttatactatcttcttatgtatatacggcagaacgcaggcgtccttacaggagagggcagcgtagatatcgtacagcgttacagtcagatcatccggtccgtatgctttaaccagacaatgatggtgatgatcgctgcctgtgcagtagggatcatggtggtatacctgatccgcaggctgtctgtagattatgcctggatcatagcgatcgtagctggaacagtagcacagcttttggtgatctttgtaggagattttgttttcggggtatccgtatctgcaggaacgctgatcttcgggctgcttgtttctgtgatgctggctatgatctacaatttctttttcttctctgtagattatacccgtacagaatatgtacagtttgaggatgacgattattattattatgtaaaagcgatccccaagatggcagtaagcagtaccgatgtaaaagtacagcggatcagcgggagaaagcggaatacaagagagaaaaatacagccaggaatacggctgaaaaaatgatcaagataaataattaagataacgataattagactaaaggaggatgatataaggtgggaatcttaacagaacttatgatgaaagcctcatcctggctgacgctattgccaaggatctccctccggaatttgtttgagatagcgattatctcattcctggtatatgagatccttttctggataaaaaatacaagggcatggaccttactgaagggacttttaacgatcatggtatttgccattgtggcggtccttttacgtctggataccattgtctggatccttaaaaatattacaacgatcgcagtaacggcatttctggtcgttttccagccggaactgcgaaaagcactggaacagttaggcagccagaacctgttatccggtattctggctcaggatgacggaaagagcagtcaggaatttaatgaccgcacagtcaatgaactggtacgtgctacttttgagatggcaaaggtgaaaacaggagccttaatggtcattgaaagaggaacttccttaaaggagatcgagaggaccggtattgagatcagcggactggtcacaagccagcttcttatcaatatttttgaacacaatacacctcttcatgacggagcggtggtgatccgcggaaaccgggtggcagcggctacctgttacctgcctctttctgacaatatgtctattaataaggcattgggaaccagacaccgtgcagcagtaggtgtcagcgagacaacagacagccttaccattgttgtttctgaggaaacaggacgggtatctgttgcagaaggaggaatgctccgcagtgttccaacagcagaggcacttcggaatattctttccggactgatgaaagaagagccggtttcttccaaccggtttaagatatggaagggaaggctgatcaatgggaaaaaagctgacaaataacttaaaactaaagatactttccgttttccttgccttttttgtgtggctggcagtgaccaacatttccaacccggatgtaactgctaccaaggaagtacctttggaggtgctgaacgaagatgtgctttccacaaacggaaaaacctatgaactgatcgacaaccgcacgacagtgacggtagcatacaaagtgcgtacactggatgcaggaagtatttctgcttctgacttccgggcctatatcgatctggcagatatgtacgagcctacaggagcagttcctgttaaggtagatgtaaagaataataaagtagatgctgtaacagcaaaacctatggtgatccgtgtgactacggaagatgtacagcagaaaaagtttgacctgactgcctatacagagggaaagaccgagtccgggtacagagagggaaccgtcaatatcgtgcccaccagtatttatgtaagcggacctgaatcacaggtaggacggatcagtaccgttggtatcaccattcgtttagacggtgcaaactctgatctttccggtacagcccagatccagtgctttgatgcgaaccgcaataagatcactctggatgatcgtgtgactttaagccggtcagaggcagattacacactttctattttaaaagtaaagactctggggctgaattttgagacagagggaagagttgcagacggataccgttttacagggatcgagagtaatgtaaattccgtagatgtagtaggacttaagtctgatctggcagagatcaatgccatcaacattcctaagtcagagttaaatatggacggtgcttctgcagacaaagaagtgatcattgatttaaacaaatatcttccggaaaatgtagaactggcagactctaacagcaagatccatgtgactttaaaggtagaacctttagagaccaggaccattgagttaaaaacaagcaagatccgccaggtaggcgcttccagccgttacagttaccagtatgacagagatgctatccgtttaagcatcaagggcttacaggaagatttagaccagctgaccgatgatgatttagaggcagaggtagatgtaagcgatatgggacctggaacccatcctggaactgttacatttgaactgggtgcagcttatgaactggtaagtcaggatgatcttcagatcattgtccatgacagggaaccgggagatactgtaccggcacctactcaggaagagacaggaagcagtacaagggagacaacagcagctgaaagcagctccggtgcatccaatcatacaacagcggctgaaacaagtcattaattaaggggaaaataagaaaaaaggcagtttatatgctgcgggaaatcaggagaataaatatggtaagtggaacaacagtgatcaagaacccatccggtcttcatttaagacctgcaggcatcctttgcaaagaggctctgctttataaatcaaaaatctcttttaaggtacgcaatgtgacagcaaatgcaaaaagtgtactcagtgtgcttggagcatgtgtaaaatgcggagaagagatcgaatttaactgtaccggccctgatgaggaaaaagctcttgcagcaatgatcaaaattgtggaggacggattaggggagtaaaccataaattaataaggaggacacacatatgtttaagggaacaagtgcttctgccggtattggcattggcaaagctgtgatcgtagaagaagcagaattagtgatcacaagaaatgaggtagcagatgcagaggctgagatccagcgctttaagggggctctggaaaagaccattgcagctacacagaagatggcagacgatctggcttcccgcgtgggagagaaggaagcagagatcatgcagggacacatgatgctgttatcagatcccatgcttacaggggagatagaaaacagcgttaaaaatgataaggtaaactgtgagtttgctattgaaaatgtgtgcaatatgtatgcagatatgtttgcgtctatgggagacgaactgatgcagcagcgcgctacggatatgagggatatcaaagtgcgtatgcagcgtacattaatgggtctggagtctgtagatgtatctttactgccaaagggaagcatactggtagcaaaggatctgaccccgtccatgacagcaggcatcaatccggaaaatgtttccggtatcgtaacagagctgggaggaaaaacctcacacagcgctattttagcaagggcactggagatcccggcagtagttgcagtaaatggcctgatggatgcagtaaaggacggagacagtgtagtccttgacggaagcactggagaggtatttgtaaatccggaggcttctgttgaaaaagaatacgaagaaaagagaagccagttcttaaaagacaaaaaagaactggaaaaatacattggacagctttctgttacaaaagacggcgtacaggtagagatcgttgccaatatcggtaaaccggaagatgtggacaaggtgttacagtacgatggagaaggcgttggtctgttccgtaccgagttcctgtttatggaccgtactgccatgcctacagaagaagagcagtttgaagcatacaagaaagtagctattgcattaaacggcaagccggtgatcatccgtacattagatatcggcggtgacaaagagatcccgtatatgggactggaaaaggatgagaacccattcctgggctatcgtgccatccgtctgtgcctggacagaaaagaggatatttacaagccacagctgcgtgcccttttaagagccagcgcatatggcaatatccgtattatgatccctcttgtaacctgcattgacgagttaagagaggcaaaagcactgattgaagagatcaaggctgaattagatgaaaagaacattgcatacaagaaagacatccaggtaggtatcatggtagagacagcagccgcttccctgatcgcagatatctttgcaaaagaggcagatttcttcagtatcggtaccaatgacctgacccagtataccatgtcagtagacagaggaaacaagaaggtatcctatctgtactctaccttcaatcctgcagtactcagaagcatccgccacattatcgcatgcggacgtgaagcaggcattatggtaggtatgtgtggtgaagcagccagtgatccgatgatgatcccgctgttacttgcctttggtttaaatgaattcagtatgagcgcatccgccatcctgcgcgcaagaaagatggtaacagaatacagtgtagaagaacttcaggcagtagctgacaaggctatgagctttgcaacaacagcagaagtagaagactacatgagaaagtttgtggagaagattacaggttaatggcagtttatcttatttgttatggaatcagttttattctggcctggcagcacttatatgtgctgtccggccttgttttagttggagcagcagtatggctgtatatcagagattatatccggacaggaaacctgatccacctgcgaggtctgttctgtctgttttttgtaggagggcagggaatttcctgctttaagctttcctatctgcagacggactggctgcttattacatggatcagcttctttctggcagttatggcattctggtgggtatttgaggtgctgaccagattgtatgacggctggagtgcagcggatatgggttctgtatacaaatattattcatctgctgactcccctttacaggcaaaccgtattctgatctccatggcagtgatcactctggtttctatcctggcctttgcttttgaagcatggagactgggctttgtgccgatgttttcctatggcgtaccacatgcatattcttattttcatattaaagggatccattactttactgtatcctgcgtactggtcccaagtctttccgttgtatactgtctgatgatggcaagaagaggaagaggactggtaagatacaagggcttctggctggcagtgatctgtgatattgtggcagtgatgatcccgctgttatgcgtttcccgtttccagctgatccttgcagtgggaatggctgtatttacctacatttccatgacaggaagcttcagcctggtttatgtgggagtgttgtttgtggcactgatcccggcttatgttgccttgactgtgcttcgcagccatagcgtcgagtacttaaacggcatttttgagatgaagaatagccatatgccgatttttatcactcagccatatatgtatatcgctaataactatgacaactttaattgtatggcagcggagttaaaacatttctcctttggacttaagggactgttcccgttatgggcgctgacaggacttaaatttatcttcccgtcactggcagattttccactgtttgtgacaaaagaagaactgactacagtaacactgttttatgatgcgttttatgattttggtgttgtgggaatggtatttttcggcggtcttttagggggtgtctgctatctgttgggacgtttcagaagaaaactcacctgccccgccggtcatgtgatctacgcccagatcgccatgtacatgatgttgtctttctttacaacatggttttccaatcctactacctggttttacctgatcgtgtccgggatcgtgtatgtgtatgtgaattcttaataatggataaaattgaaaaataaactgtttaggctctgcggctgcagggcctttttgctgctgtaccattgactaacagaccaaaacggttggttgaagcacctgtatgagtgatttataatggaatgagtgcagagaaaaataagcggctgcgtagcagacatttgtttttcgcaagccattaaactcatacaaggagaaggaacatggaaaagaaacaatcattagataccatttgtatccagggcggctggcagccgaaaaacggagagcccagacagcttccaatctatcagagtactacttttaaatatactacaagcgaacagatgggacgtctgtttgacttagaggaaaatggctatttttatacaagactggcaaatccaaccaatgacgcagtagcagcaaagatctgcgctctggaaggtggcgtaggcgctatgcttacctcttccggtcaggcagctaacttctatgcgatcatgaacttatgccaggcaggtgaccatgtagtcagctctgcagcaatctacggcggaaccaccaacctgtttacggttacgatcccgaaaatgggcgtagaatgcactctggtaagcccggatgcaacagaagaagagctggcagcagctttccgtccaaatacaaaggcattatttgctgagaccattgcaaacccggctttaacagttctggatattgagaagtttgcaaaggtagctcatgagcatggtgtacctctgatcgtggacaataccttcgcaaccccgatcaactgccgtccgtttgagtggggcgcagatattgttacccacagtaccaccaagtacatggatggacatgctatgacagtaggcggctgtatcgtggacagtggaaactttgactgggaagcccatcatgataagtttaccggtttaacagagccggatgagtcttatcatggcattatctatacacagaagtttggaaaactggcttatatcacaaaggcaacttcccagctgatgcgtgatctgggatccatccagtccccgcagaatgctttcctgatcaatgtaggactggaaacactgcaccttcgtatgccaaagcactgtgaaaatgccttaaaggtagctacttacttaaaatccagggaagatgttgcctgggtcaactatccgggactggagggagataagtactacgagctggcaaagaaatacatgccaaacggtacctgcggcgttatctcttttggcttaaagtccggaagaaagggcgcagcagactttatggataagttaaagctgtgctccattgagactcatgtggctgactcccgtacagctgttcttcatcctgcaagccatacccacagacagctgacagatgagcagttagtagaagcaggcgtagacccgtctatgatccgccttagtgtaggtattgaaggtgcagacgatattattgaggatatccggcaggctctggagtagacaaaatgaaagaaattcgttattttttgttgagaatagcgattaatcattaataaaaactacataaaattgtgcaatatgcacaaatgcaataaaatatttttgagaaatttcaatctagactaaaaaaatagttagatatataataaagacaatcaaataaatcaattgtctgatatgtatatcctggggatcggcccagagtttctaccaactaccttaagagttgactacatagtttatgtagtcagctctttttttctaccctcagggtacattttccgtagttatcctgtaagcatctgcgatggggtttggcaggtcaaaatggggaagtggaaagggctgtttttcatcagataggggctgtcctctcaggtacagcagacaaaaaacttctcacatgattaagtacagaaagattccgggagaacataaggttagtaaaggaggaagcgtttatgaaagttgtaggtcagggattgaaccgtgttgatgcatatggaaaagtaactggcgaagcgaaatacagcgcagatttagagccaagggatatccttcatggaaaggtgatccattctactattgcaaatggtcttgtaaaaagctttgatcttacagaagcattaaaggtacctggtgttgtaaagatccttacctgctttgacgcaccggactgccagtttccaactgcaggtcatccatggagcgtagaggcaaagcatcaggatatctgcgacagaagagtattaaaccagagagtaaggctgtatggagatgatattgcagcagttgtagctgaaaatgaggtagcagctgcacaggcagcccgtctggtaaaggtagaatatgaggaatatgagccgatcgttaccgtaaaggcagctatggcaccgggggcaacaccactgcatccggatatccgtaaagataatgtgatcgttcactcccatatgactatgggaccaaaggattttacctttgaagacggcttaaaacaggcaaaagaaaaatataaagaggaagatctggtggagatcaatgaagtatacgatacaccacgtatttcccactgccatatcgaacttcctgtttcctgggcttatgtagatgtaaacggaaaagtaaccgttgtttcttctactcagatcccgcatattgtacgccgctgtacagcgcaggcgttgggtattccgatcggtaaagtccgtattatcaagccatatatcggtggcggatttggaaataagcaggatgtgctgtatgaaccgttaaatgcgttcctgacaatgagcgtaggcggaagacctgtaagactggagatcagccgtgaggagaccatttccggaaccagaacccgtcacgccatcgaaggtgtatgccgcggcctggtaacaaaggacggtacggttcttgcaagacagttagacgcttatgcaaacaacggaggttatgcttcccatggccatgctatctgcgctaactgcggaaatgtatttaaggatctgtacagagaccgtttaggtgctgagattgactgctggactgtttatacttcttcaccgactgccggtgctatgcgtggatatggtatcccacaggcagcatggtttgcagaatgtcttacagatgatatggcaacagctattggcatggatccctatgaattccgtatgaagaactgtatggaagacggtttcgtagatcctgcaaatggtattacattccatacatatggcttaaagaaatgtatggaagcaggaaagaaatacatccactgggatgaaaagagaaaagagtatgcaaaccagaccggtcctgtaagacgtggtgtgggaatgtctattttctgttacaagacaggtgtacatccgatctcccttgagacatcttctgtacgtatggtattaaaccaggacggctccatgcaggtatccatgggtgctacagagatcggtcagggcgcagatacagtattcagccagatggcctctgagactacaggcatttcctttgataaggtatttatcgtatccacccaggatacagacctgacaccatttgatacaggtgcgtatgcttccagacagacttatgtatccggtatggcctgcaagaaatgtgcaacggaattaagacaccgtattctggactatgcagcatacatgttaaatcatgatgtgacggatctttctaagactgtgtacgcagatctggtaaaagaggcagccggaaagcttcgtgaagcattaggactccatccggaagatgaggttaaggaagatatgttagacatcgttgacagcaagatcgttgtacacggtggtgatccggtcctctttgatgtggcagtagtagcagatacagccttctattcattagataaatccattcatctgactgcagaagtgaccaaccagtgtctggataatacattctcctccggctgctgctttgtagacgtagaagtagatatgccactgggactggtaactgtaaaggatatcatcaatgttcatgactccggtatcctgatcaatccaaagacagcagaggcacaggtacatggcggtatgagcatgagccttggatttggactttccgaggaattattagtggatgaaaagacaggacgtccattaaacaacaacctgctggattataagatcccgactgctatggatgcgccggatcttcatgtggagtttatccagttagatgacccaacaggcccttatggaaacaagtctctgggtgagccacctgcaatcccggttgcgcctgcagtaagaaatgcgatcttaaatgctaccggtgttcatatgaacgtaagtcctatgacagcacagagactgatcgaaaaattcaaggaaaaaggtctgatctagggaggtgaatgagtatgtttgatattaaatcattttatgaagcaaaagatgtaaaggatgcagtggaagcactggtacgggagcctgaggcagaagtcatcagcggcggtaccgacgtactcatccgtgtaagagagggaaaggatgcaggaagagccctggtatccatccacaatattaaagaattaaagggcgtaaaagtcctggaaaacggagatctgtggatcggagctgcaactgcattttcccatattaccaatgatcccaccatccagaagctggttcctatgttaggcgaagcagtagatatggtaggcggacctcagatccgtaataccggtaccattggcggaaatatctgcaacggcgctacatccgcagactccgcagcaagtatgtggaccctaaacgcgctgatccagttagaaggaccagaaggacacagagaggtgccgatccatgagttctatacaggaccaggacgcacagtaagagacagatgtgaggtctgcaccggtttcattatcaaaaaagaggactatgaaggctggtacggacagtatattaaatatggaaagcgtaaagccatggagatcgcgaccttaggctgcgctgtacgtgtaaaactgtctgctgacaaaaagaccattgaagatgtaagactgggatacggggttgccggacctacacctttaagatgtcacgcagcagaagagtatttaagaggaaaggctgtttctgataaagaggcagcagcagagtttgccaagctggcgctcacagaagtaaatccaagatcttcctggagagcttctaaggagttccgtcttcagctgatcgaagagctggcaaaacgtggcctggcagaggctataagaagagcaggaggtgaagaggatgcttaagatcattcatatgacagtaaacggaaaggaaacagaacttgcagtggatgagagagagtctcttctggatacactgcgcaaccgcttaggacttacatccgtaaaaaaaggatgtgaagtaggagaatgtggtgcctgtactgtgctggtcaatggagaggccattgacagctgtatatatctcaccatgtgggcagacggaaagagtgtaatgaccgtagaaggattgaagggaccaaacggggaattgtctccgatccaaagggcgttcattgaagaagcagctgtgcagtgcggcttctgtactccgggcctgatcatgagtgcagtagaaattgtaggaacaggaaaaaaatataacagagaggagctgaaaaaactgatctccgggcatctgtgccgctgcacaggatatgagaatatcttaaatgccatggaacgtattgtggaggaggtttacaaggtaagccataaagaataatcgggggaagattggaggcagcaaaaactatgaaagagaatgcaaactgcagtatcagcaacatttacaaactagacgggcgggtgcccattggaaaggccattccatttggtcttcagcatattttggcaatgttcgtatctaacctggcaccgatcaccatgatcgcaggtgccgcaaaggtaccggttaccggagcagagcttggtatgcttcttcagaacgcaatgttcgcagcaggtatcgcaacgatgatccagttatatcctttatggaagatcggatccagacttcccgttgtaatgggtgtcagctttaccttcgtaactgtacttagtacgatctcagctaattacgggtatccggcagtaataggagccgtattgatcggtggtctgtttgaaggaactttgggactttttgcaaagtactggagaaagatcataagcccgatcgtagcagcatctgtagtaaccgctattggtttctcactgtttactgtaggtgccagatcctttggcggtggctatgcaaccgactttggttccgtttcaaacctgctgttaggtctgatcacattagcaacctgtctgctttggaatatgtttgctaagggatatttaaaacagctttcagtattagctggtctgatcgttggttatattgttgcaatctttatgggtaaagtagatttaagtatgatcatgtccggcggcatcgtggcacttccacatctgctgccgatcaaaccggaattccatgcaggagccatcatgtcagcatgcattatcttcctggtatctgctgctgagaccattggtgacacttctgcactggtagcaggcggtttgggacgtgagatcacaggagaagagatttccggttccttagcatgtgatggctatggttcctttatttccggtctgttcggatgcccgccagttacctctttctctcagaacgtaggtctggtagcaatgacaaaagttgtaaaccgtttcactatcatgactggtgcagttgcaatgatcctggcaggtctgttcccgccgatcggtaacttctttgcatcccttcctcagtctgtactgggcggatgtaccatcatgatgtttggtactattttaacatctggtatgcagatgatcgctaactgtggatttacccagagaaatatcaccattgttgcaatggcattatccattggtattggatttaccactaccagtgaaagcggtatctgggctgaattctcaccagttgttcagtctgtattctctgcaaacgtagtagcagttgtgtttgtagtagcaattatcatgaacctgatccttccaaagaatatggaagtggaaaaactggataaataagggaaataggaaaacatacatatataatgtatacgggaaaaagaacgtgacaaaggtccggagtcagaatatggctccgggccttttgtgtgtatcaaaacagggtgatccagtgatctgacatagatttgacaatgatcttacatgtgtacattgcattttatggaaaaaagtgggataattattgtttaaataagttatgatagaagtagattttattgttgaaaaatgtgaaatgaggagcgatatacatgaaatcacagccgagaccgagaagccttttcaggatcatttttggaaggaccacttttgtgatcctgggattgcttttgcagatcgcctttttcttcagcattttccgctggttgggaaattatattcattttgtttatattacttatgtactggtaagctcatctgttgtcatcgctattttaaaccggcctatggattccagctttaaaatggcatggatcataccggtactgctgatccctattttcggcattatcttatatgtgtttgtgcaggtccagttccagacaagggcgctggcaagacgggtcaatctgtctgttgaaaaaacaaaaccttatcttgtccaggacccacaggtgcagaagcggctgcgggcagccagtgtgcgtggaagccgtctggtagattatatgaaccacattgcaggtttccctgtgtatgaaaatacagcagcgaaattcttccctctgggagaagatatgtttgagcagctgatggaagaattaaaagcagcaaagcattttatcttcatggaatattttatcattgaccggggctatatgtgggacagtatcctggaggttttaaggcagaaagcggcagagggagtagaagtacgtgtcatgtatgatggtatgtgctgtcttatgctccttccttatcattatccccagaaactggaaaatatgggcatccggtgccagatgttttcaccaatcaaaccagtgctttccacacaccagaattacagggatcacagaaaggttacagtgatcgatggacataccgcctttacaggaggtgtgaacctggcagatgagtatattaacaggaaagaacgttttggacactggaaagatacagccatcatgatcaagggagatgctgtaaaaagttttaccatgatgtttttgcagatgtgggatgcagccagctccaaaagtaagaatgaagaaaattatgagcagtatctggtgccggcggattacaaactgccggaggtatataaggcagatggctttgtcatgccttatgcagacagtcccttagatgaagaacaggtgggagagcaggtctatctggatatattaaaccaggcaaagtcctatgtacacattatcaccccttatctgatcctggatgacgggatgaaaaatgccatggcctatgcggccaagcgcggcatcgatgtaaagatcatcatgccccatatcccggataagaaatatgcctatctgttagcaaggacttattatccagagctgatcgcttccggtgtaaagatctacgagtatgagcctggttttacccatgcaaagatctttgtcagtgatgatgaaaaggcagcagtgggaagcatcaacctggatttcagaagtttatatctgcattttgaatgtggaacctatttatacagaaacagtacagttgcagatgtggagaaggattttgaaaatacactggaaaaatgtattcctgttacgttaaaggactgcgcacagtacaactggttcgggaccaaggcaggaagatttttaagattgattgcacctctcatgtaacaagcccaaaagaaaaacaagcgccaccgcaaggtggcatttgtttttcttgggctattaacgaaggtccctcctgtgactatttttgaccaaaaaaacacaaccagaacacattttgttcacaaaccaatgataaactttcaaacaatgaacgaaacatgaacaaatacgaaaaagttgtttaaacagatgtgaattgtttgagaggagttttccattatgaaagtacgaaaaaaccacacacgtttcctgtgcggctctctggcggctgcagcggctatttctcctatactgagtataaccgcatgggcagacaatatttccacagccaattttaatctgcgccagcaggttgtaaagctgaccggtatcatggagatatccagtttcagggaaagtgttaccagagcggactttgcaaaaatgctggtaaaggcatccagttaccgcgaaaatctgccaacttccaatgtttctgtttacgcagatgtgccggcaacggatccaaatgcagtgtatatccgcattgcagcaagagaaggctggatgagtgggtacttaggtggaaaattcaaaccggaggatccggtcctttataaagatgcagtaaaggctatccttaccatgttaggttatacagatgatgattttacaggagatctggtctcttcccgcatatccaagtttaactatctggaattaaacgaggatgtaagccgtcaggctgccgatgaggtgaaccagacagactgcatgaatattttttataacctgttaaagaccaagaaaaaggacagcaatgagatctatggtacgatcttagactgtgagttaaattctgacggtgagatcaatcccatcactattctggatgatgagcggaaaggcccgatcctggtacataaaaacttcagcgtttcccagtctgtaccttttgatacagaagacgcaaatgtgttcttaaatggtgtggcaagtactttatctgcagtaaaatccgcccagcagcaggctggttttgcagttttatattacaatgtaaaatcaaagacgatctgggcttataccaccatgggctgggacaatgatgataattccggcaataactcttatatcctcttaaagggtgagatcaaaaatatttattataaatccacggatgttatgacaccaacttctgttcgtattgaagtagatcaggcaaattcagatgacagctttgataccagcgaggatgtagactctgatggttacctgaccatcagccttgactcttcggaactccagtatatgttctctatttatggagatctggaagtaggcgatgacgtagtcctggtatgtaaccgcaacggaagctcttatacagcggttgatgcacttgaatactaagggggatattatgaaaaagaagaaaaagtggatcaaactggtgatcatccttcttgtgatcgccattgcagcaggagctatctttgtatggaaaagtcataaggctaaggcagcagcggcagctgcaacagcagaaaatacagcaaccgtagaaaaaagaagcatcagttcccagctgtcttcttccggcacattggaggcaaaggatacttacagcatcacttccatggtggaaggtgaggtagtatctgccaactttgaggaaggtgaccaggtggagaaggatcaggtcctttatgagatcgaccgatccagtatggatacagacttaaacagtgcccagaattctgttacccggtcccagacctcttatgcagacgcactggatgattataaccaggcagcatcggattacagcggaaatacatataaggcaactgatacaggctatattaaggaactgtatatcagcgtgggagataaagtcagcggaaatacaaagctggcagacatctacagtgatgatctgatggagatccgcattccatttttaagcggggaaacagaactgatccctgtaggcagcacagctgttcttacactggttgattccggggagcagatcgaaggtaccgttaaggcagttgcaaacagggaagagactctttccggcggccgtctggtaaaatatgtgacgatcactgtaaataatccaggcggacttaccacttcaacagtagcttctgcccagatcggtgagtttgtaggcagtgaagagggtacttttaaggcttccacagatactactatgaacgcagatctggctgtaagcgtagaagtagaagaactgctggtccatgagggcgattatgtgaccaagggaactcctattttccgtatgacttcccgtacagcagaaaaactgatgcgcaattataaggatgctttagacaaggcccaggaaagtgtagagtctgcccagagcaagttggaaagcacccaggacagctacgataattataccatcacagcaccgatctccggacaggtgatcacaaagaactttaaggtaggagataacattacaaaaaataccagttctaccactacactggcaactatttatgacctgtctgcactgacatttaaaatgtccattgatgagctggatatccagagtgtaaaggtgggccagaatgtaactgtaacagcagatgcctttgagggccagaccttctcaggaacagttacaaatgtcagtctagaaagtacatactctaatggtgtcagcacctatccggttactgtaaccatggatgaagtaggagatctgcttcctggtatgaatgtagacggtgtgatcacattggaagaagcaaatgatgttcttaccatcccggtagatgccctgatgagaggcaaccaggtctatatcaaagatgactctgtaaaagagcagcagggaccggttccagcaggctttaaggcagtggaagtagaaacaggtctgaccaacgactcttatgtggagatcaagagcggactttctgaaggtgatacagtctatgtggctaaatccagcaccggttctaccaattcctttatgggtggcccgggaatgggcggccccggaggcggtatgggcggcccgccaagcggtggcggtaatgacggcggaaaccgtggtggaaacggcggcggcccaagatagagttatccacaagagagcagggcagtgtgaaaggagtttttatgtttcgtttgtggaaaggtcggaaagatgctgagaataaaacaaacaacttgaatgagaaaaatactcatgagataaaatctcaaattgagaatgatggcacaaatggtacagatctggataaaccaggcagccatcttattgatcttcgccacattttcaagatctactatcttggcggcgaagaggtccgtgccaatgatgatgtaagcgtagctattgacaaaggtgagttcgtagcgattgtgggaaaatccggaagcggaaaatccacattgatgaatattatcggagcgctggatgtgcctaccaaaggagaatactacctgggaggggaagatgtaagcaaaatggaagataaacagcttgcaaggatccgcaacaagatgatcggttttatcttccagcagtacaatcttcttccaaagttaaatctcctggaaaatgtagaacttcctcttctctatgcaggagtgggaagtgaagaacgcaggcagcgggctatggcttctttagaaaaagtaggtctggcagaaaaatggaaaaatatgccaaatcagttatccggtggtcagcagcagcgtgtatctattgcaagagcgctggccggggatccgtccctgatcctggcagatgaacctacaggcgccctggactccaagaccagccgtgaggttttaaatttcttaaaacagttaaacgaagaaggaaataccattgtaatgatcacccacgataattctattgccatggaggcaaaacgggtggtgcgcattgcggatggacacaaaatatttgacggagatgtaaaagattatgctgcaatcctttaaactggctataaaaagcatatggggcaataagatgcgctctttcctgactatgttaggcatcatcatcggtgtggcagcggtcattatcctggtaagtctggtcaatggctatatgggaagcgtagtggaaagctttgccagcatgggtgtaaaccagatcaatgtaaatatgaccaatcttacatcccgtactgtagatgtagatcagatgtatgcattttacgatgaacacggagatctttttgatggcatcagccctaatgtatctctgtcagctactgtaaaaaagggagatgactccatggactctaccagtgtggcaggcagaagcgagcagtacctggatatgaaggattatgatctgcagatcggaagaaatattgcttattctgatattgcttcccggcagaaagtatgtgtgatcggttcctatgtggcccaggaactgtttggaagtgcagaaaaggccattaatgagacactgaaaataaatggttatgcctttaaagtagttggtatcgtggagactcaggatgaggataacatggaagacggcggaacggatgatttcgtgtggatcccttacagcgtagccaccagccttgcaggaagcgccaatatcagcagttatacattaacggtatcagatacagataatgcagatacagccaagaccctgatccagaatttcctgtatgagacctttaaagacagtgacctttacagagtaacagctatgagtgagatgctggactccttaaatgaacagatcgccatgatgagcggtatgctaggcggtattgccggaatttcccttttagttgcaggtgttggtgttatgaatatcatgctggtatctgtaactgagcgtaccagagagatcggcatcagaaagtcactgggagctgacaagggaactattttacagcagtttgtcattgaggcggcagtgaccagttctttaggcggcgtggtagggatcatcatcggttgcgtagccacaaaagtagtgggaaccatgatcgggatctccacatcccctacactggcggcagtgctgatctcctttggggtgtcagtagccattggcctgttctttggatatatgccggcaagacgggcggcaaacttaaaccctattgatgcacttagaagtgagtaataaacgttataagagccgcttgaataatagccaaatgtgagattttacatatattttacatttggctgtttttgtttttacacagctgtggtatgctgatgataagaacataactgcatattgcggttttgcggttaaaaagggaaggacgaggatcaccatggataaaatttatatcatcgaagatgatgaaaacatacgcaatcttttaaaaatagcgctggaaggctttggttatgaggcagaaggctttgaaacagcagaagaaggattagagcgcatcaaagaagaagtaccgtcacttgctatttttgactggatgcttccgggaatggatggggttacggcaatccgcaagatccgccagacagatggcctgcaggaacttcccattatgcttttaactgccaaagagaaagagctggacaaagtagtaggtcttgactgcggcgctgatgactatatggtaaagccatttggtgttctggagctttctgcaaggatacgcagcctgctgcgccgcgccaaaagagaagaaaagaaggatacccttacttttgaagatatcgtagtcaacaaaaagaccagggaagtgaccagtgaaggtcatttatgtgaactgaccttaaaagaatttgaacttttggtctatctgatggaaaaccagtcccgtgtggtcacaagagacgaacttttaaatcaggtctggggctatgaatacgacggggagacaagaacgctggatatgcacatccgtactctgcgtcagaaactgggagataaggaaagttcctgcattaagacagtccgtggtgtaggttacagactggtgcatcaggaaggataaaaccggagagagaggaaaaagtatgagaaaagccattcttgagaaatttatctttgtacttttagcggcgctgtgtatcaacagcgtcatcttttatattgccagccggaatacgatactggatacaacaaaaaaagacatgctttacaccatggagatattggatcagactctggattatgagggagatctggcaggtcaggtgcagcggatggagaattttacagcgggaaatcccagccgtctgactttgatccgtacagatggaacggtggtttctgactcagatgcagatccggctgaactggacaatcatttaagcagaaaagaagtagtccaggcaatgaaaaagggcagtggctttgcggaacgttattcccacacattaaagagaaatcttttatatgtggcctacagatccaaccgggccgatatgatcatccgtgtttccgtgccttattccggggccagcgaatacctgaccatgctccttccggcggctcttttcagcttcctggcggctcttgcctgtgcgctggtggtttccaaacgtttcgtggactctgtgacacagcctttaagcaatattgcagcggaaatgtcaaaggtaaagggagattacaaaggagactatacagaactgcattttgaaaaatgccagtatccggagttaaatgtgatcgctgaaactaccatggaaatgtccaaaaatgtgaaagcctatctgagctgcattgacaaggaaaaacagatccgtcaggagtttttcagcaatgcttcccatgagttaaaaactcctatcacatctatccagggttatgcagagttaatggaaagcggtatgatccaggatgagaacatgaaaatggactttatcaaaaggatcaaaagggaagccatcaatatggccggccttattaatgatatcctgatgatctccagactggaagcaaaggatgcggaagtggttgtatcagatgtgagagtcagtgtgctccttgaagagatcatagacagtttaaaacctgcagcagcagctggacaggtatttatacactgtgactgccagcctcttagcatcaaggccaatccgcagcagatgaaagaactgctctccaatctggtgagcaatgctgtaaaatacaaccggccaggtggtcaggtatgggtaaatatccgggaaaaagacggaaatatggttgcccgtgttcgggataatggtgttggcatccctcaggaaagcctggaccgcatttttgagcggttctaccgggtggataagggccgcagcagaaaacagggcggtaccggtctgggactttccattgtaaagcacattgttaatttctatcatggaaccatccgtgtgacttcccagttagatgaaggtacagaatttgtagtgactattcctttaaactggaaagacctgtaaaatttaaaagaccggtcaaggatataactggaaaaaactggaaaatccattggtaaaaacgacgaaaaacactttattgctttaaattctaagaaatttaaagcaataaaattgacgtggggatttttttgtagtatcatacccttagttcgtataaaacgaatgagtttttatcgaaaagaggacggtattatgaaaaaatctacaaagatcatgtcagtattattagcagcagcctgcgcagcatctatgaccggatgcggcggctccggcagcacagctaccacagcagcagcgtctgaagcagcaacagaggcagcttcttccgaagaagcaaagagcgatgcagcagcttccaccgatggaaaaacctacaacgtaggtatctgccagctggtacagcacgtagcactggatgcagctacccagggatttaaggatgcattaaccgatgcactgggcgatgcagttacctttgatgagcagaacgcacagggtgactccaacacatgttctaccattatcaacagctttgtttccaatcatgtagacctgatccttgcaaacgcaaccccatctctccaggcagcacaggcaggaaccaatgagatccctgtattaggtaccgctgttacagagtatggtgtagcacttggcattgacggttttgacggtctggtaggcggaaacatttccggtacttctgacctggctccactggatgagcaggcagctatgcttcacgaactgttcccggatgcaaagaacgttggtctgttatactgctctgcagaagctaattcccagtatcaggtagatactgtaaaggcagctctggaagaaatgggatatacctgcgaatactacgcattctctgactccaacgaccttgcaaccattactaccaatgcagcaaccaacagcgatgtgatctatgttccaactgataatacagtagcagcaaacacagagatcgttaataacatctgccagcctgcaaaggttcctgtaatcgcaggagaagagggcatctgctccggctgtggtgttgcaactctttccatcagctactatgacctgggtgttgcaaccggtaagatggcagttaagatccttacaggagaagcaaatgtttctgaaatgccgatcgaatatgcacctcagtttacaaagaagtacaacaagaccatctgcgatgcactggagatcacagttccagatgattatgtagcaatcgaggaataataagaaaaactaagtttgcaaagaaacttttaatgtaaaaaactttcatggcagacacagcgggaaggcaaatgggcctcccgctgtatgctgttctaaaggggaaaacaatgaatataatgagtttattaaatgctcttcctggagcagtggcacagggcctgatctggggcatcatggccattggtgtttatatcacatttcgtatactggattttgcggatctgactgtggacggttctttatgtaccggcggtgcagtctgcattatgatgatgttaaacggacagaatgtatgggtgtccatgtttgcagcactccttgcaggaatggtggcaggctgcgtcaccggacttttacatacttttatgggtatcccggctatcctttccggtattcttacacagttaggcctgtattctattaacctgaaaataatgggaaaggcaaaccaggcgattaacgtagacaaatacagcctccttgtttctttacgttttatccgcaatgtgcctctctttaaaaataccattcttttagtatccctgatcatcgttgtgctgatcgttatcctttactggttttttggtactgagcttggctgctccatccgtgcaaccggctgcaatgacaagatggcaagagcccagggtattaacaccgactttaaccgtgttctgggtctgatgatctctaacggtatggtagctctttccggagctcttctttcccagtatcagggctttgctgatatcaatatgggccgtggcgctatcgttatcggtctggctgctgttatcatcggagaagcaattttcggaaagatcttcagaaactttggcttacgccttttaagtgttgctttcggttccattatttactatctggttcttcaggtagtcatctggctgggaatcgatacagacctgttaaaactgctgtctgcagcagtagtagccatcttcctggcaatcccaacatggaaggcacgttatttttcaatgggttctaaaggaggtaaagcctgatgcttcagatcaaacatgtatcaaaaacctttaataaaggcacagtaaatgaaaaacaggcgttaagggacttaaaccttacgctgaaagagggagatttcgttaccattatcggcggtaatggtgccggcaagtctactatgttaaacgctattgcaggtgtgtggccggtagacgaaggccagatcatcattgatgataaagatgtgaccaaacttccggaatataagagagccgctttcttaggccgtgtattccaggatcctatgaacggaactgccgctactatggggattgaggaaaatctggctctggctttaagaagaggaactcttcgtaccttaaaaccgggtatcaataatagtgaaagaaagctttacagagatctgctgttaagactgggactgggactggaagaccgtctgacttccaaagtgggacttctctccggcggacagagacaggctctgacattgcttatgtctactttgaagcggccgaaactgcttttattagatgagcatacggcagctcttgacccgaagactgcaagaaaagttctggaactgacagaggaaatggtcaacgaacagcacctgacagctttaatggttacccacaatatgaaagatgccatccagattggaaaccgtctgatcatgatgaacagcggccacattatttatgatgtggaaggagaagagaaaaagaaactgacagtagaagatctgttagcaaaattctctgaagcaagcggagaagaattctccaatgaccgtatgatgctggcaaaatagaaaaatgtgatccaatgcccggaggggaatgtatactatggtatatagccctttcgggcaatctttttttctatgtatgtcaataatttttaacatttttaatactttgttcactttttgcagcgaaatatatgatatacttacatatagtgcgccaggaggcgtgtctataaattgccgtgcatctgtaagaaactgccgcaggcaggtcctgcagatgctctagtaataacaggagaaacaaaacaatgaatgaaaataaggattacgtatctcacctgaataaggcgagaaaaaagagaaaccagaaatgggatccccgttacctgcttttagccattgtcgttgtactgctcattggtcttggagtattagcggcggtaaatgtaaagtcggcggtttcaggcaaggcagcgagaaaaagtgataatgtgatcgaggagcctggaacgggtcttgaggcagccagcgcttccaatgcagcaagagaggaagaagagaaggcaaaagaagaacaggagatccagagcgccattgacgcataccagaatttagggatcgttcaggtatccggttatgtaaatatccgtgaaactccggatatgaagggaaatattatcggaaaagtttcaggagacggagcctgtgaggttttaggagaagagggcgaatggagccatatcacttccggcggtattgaaggctatatcagcagccaatacctggtaacaggagaggaagcaaaagaactggcaaaaagtcttgtgaagaaacgtgccattatcatgacagaaaatgacaatctgaatatccgaagcggcccaagcaaggatgcagagatcgtaggacaggcacttcctgcagagcgttatgaagtactttctgaagcagatggctgggtagagatcaacagtggttatatttccgctgattactgtgaagtaaaatatgccttaaatgagggacgtaaactggatctgaaagcacaggccattaaccagtatgataatctggtcatctttaaaaagagcggctatatgaatgtgcgcagcactccggaaaataaaggtgatgacaatgtaattggtaagctgaccagtaaggcagccggtgatattattgagacgttagatggctggtataagatcaagtccggcacagtaaccggttatattgcagcagatccggaactgatcgcaacaggacaggaagcaaaagatctggcaatgcagaatgctacccagatggctattatcacaacggatgtattaaacgtccgtgtggaaccaaataccgactccaagatctggacacagatcgtcaaagatgagcgttacccggtagtagaccagcaggatggctgggtacagatcgacttaggttctgtggatgcagaggatggcagccaggacggagatgaaaaagcatatatttcaacccgcgacaataacgtagaagtacgttatgctttaaatgaagccattaaatttacaccggccaaggatagcagttccggtgcttcatctgacggctccggctccagtaccaagcagtcccgccgttcacagcttgtaaactacgctcttcagtttgtaggaaaccgctatgtatggggcggaaccagtctgaccaatggtgttgactgttccggatttactatgagggttatggagaaatttggcgtatctcttccacattattccggctcccaggcacagatgggtaagaaagtcacttccgctactatgaaaccgggagatctgatcttctatgcaggaagcaacggaaaagtaaaccatgtagcgatctacattggaaatggccgtatcgtacatgcagccagccgcagaagcggtattaagacatctacatggaattaccgtacaccggtggcgatccgcagcatgttggattaaaagctggatcatgaccagataaaaatgaaatagcaagaaatagtattaaaaaagagatcacctgaaagaggtttaaaagctttttcaggtggtctcttttacttataccagcgggaagaataaggggattaaaaaccagatacataaaaactggatcagtgcatggggcagagtgtattttaaataatcggaaaatttatatccggctaccagcgtcatactgatctgtgctgctgccagaggagtggagcaggcaagacttgctgcaaagtagatacccaggcagacagtcataggatttaagcccatggcagttccgatagagaaaccaatgggaagtacgatcaggatcgccgtagagttggtgataaagttgcttaagatcagtgtgaggaagcagaggataccgtacacgatcattggggaagtacagttgccaaggaaactgcttgcaacatctgccaggatctttccggatccaccggtgtttaaagcgtcagcaagacctaaacagaaggcaaggaacaggatagtatcccagtccatgtttttgcggatgctttttgtgttggtacagcctgtaaggatacacagcatggctgcgcacatggcggtcatagcagtggaaagccattctgttacataaaataagatcatcagccccaggataacaaacatgatggtgatctttttatgatcggtattcccatcaccggaaatgatcttccggttggtattttccagttccatagcttcttccggacgatcaccccatatttttttaccaaggttgtagccgaataactgagtgccggccagatacagtaaaagcatgcagaaaccaggaccaaacatggtaaacatgctcatatgaaggccggtagtctgttcaagcagtgcattagcggtcagctggggagtacagccgatcagggtgctggaaccaccgatcatggcacagatggcaatattcatggtcagatttttccgcttcatattgctggaattggagcatacactttctacaatgggcagaaaagcagcaatggtagctgtgttggctaaaaacatggaaagacagccggctgtaagaccggagataaaaaggaaaagacgttcattatctctggaaagccggataacctgtctgccaatcagggcagcagctcctgtctcaaacatggcattgcctacgatcatggcaccaaagagaagatagatgatggaactggcgaagccggaaaaggcgttggacaattcgcatacatggaaaagaaccatgagaagacagccgagagcgcctgtaacaacggaaggcagccattctgtaataaaaagtacgatacaaagaagcaggataagaagacctacaataccgctggacatttttgtactcctttcagacgcatagcgccatagattttataaatgttaaaaaagtaacaatgcagaccataaaaaatctcttttcccccaaaaatcccggggaaaagagatgagagggcattttactgttcttttaattttttgatctctgcagtaagagcaggaacaacttcaaataaatcacctgtaataccgtaatcagcaatgccgaaaataggagcttcaggatccttgttgatggcgataatggtgtcagaaccgctcattccggctacatgctggatagcaccggaaataccgcaggcaatataaagcttaggagcaaccgtcttaccggtctgtcctacctggtggctgtgaccgatccatccggagtcaacagctgcacgggaagcgcctacagtgccgcctaaaacatttgccagttcctctaagactttaaatccttccggaccgccaacaccgcggccgcctgatacgatcacttctgcaccttctaaatccactgcctcagaagcagcttcacggatggtctcaaggatctttgtacggatatcagcagcatctacgtgataatcttcatggatcacttctgccttattttcagttacgtctgcttttttaaatacgcctggacggatggtaccgatctgtggacggtgatccgggcacatgatagtagccatcaggttgccgccgaatgcaggacgggtccatgcaacatttccactttcttcgtcaatatcaacggctgtacagtcagcggtcagtcctgtatttaaacggcaggaaacacggggacccatatcacggccgttaggagttgcaccgatcataagagtagacggaccgtatttttcaaccatatggcagagcgcatttgcataagcgtcggtagaataggacttgtattccggtccttctacagcgatcacctgatcagcaccatggcttccggcagcttccacagaagcagcgatattgtcaccgatcacaacagcaaccagttttcctccctgtttgtcagccagacggcgacctggatttaacagctccagaccaactttcttaggacttccgtcctcctctgtctcaataaatacccaaagatcttttgtctttgcttccatttgtgtgtcctccttcattaaatcaagtgggcttcactgagcattgccacaagtttctgtgcagaagccgtatttgactcttctttgatcataacgccgccctgtttgcgaggcggaacaaaggatttctttacatgagtaggagatccttttaaaccaatgcgggtcttgtcaatatcggggaatgcgtcttctcctaaaacaggaatttccgcacggttggcagcaagtttccgcttgatggtaggataacgtggatcaaaacttggtttggtgaaagtaaccagacatggaagagaaacagcgatcttctgatttgcgtcttcacattcctttaagatcgtaagtccgtcatttgtaagttctgcttccagagcatatgtaacctgaggcagtccaagatgttctgcaatttccggtccaacctgagcggtatcgccgtcgatcgcctgtttgccacagaagatagcgtcaaatccgccttccagttctgctacttttttaatagcgcaggaaaggatataactggttgccagtgtatcagaaccgccaaaagcgcgtccgctgatgaggtatgccttgtctgcggcaattcctaagcattcttttaatgcatttttagcctgttccggtcccatgcttaaaacgatgatcctggtatcaggatgtttgtctttaatacgggctgctgcctctaaggcatagccatcaaaaggatttacgatgctgggtactccattacggatcagagtattcgttaccggatcaatctttatttccgttgtatccggaacctgttttacacatacgagaatattcataaatcacagctccttttcacataaatgatgttcaccttaataaacagcaagttttatgccaaaaaattaactacgaaaaatcggtgattttttcagatttccctaaaaaaaccggcaattttttgccggtcatggaaagaaaaagcggaaagaacatgccggattaacaaaaaaataacaaattctggaaagatgatgtgcaaaatgtgataaaatagacaagatatgtttggcaaaaagagtgcattattaataaggaaagaacagcacattttaaaaagcaggagagaaaaagaaaaaagtctgctgaaaaaatatcaaagttggcacggatattgctctatataaaagtgaggtttcgcagtagagactcgttaataaaaagacgatacagggatctgcgaaaaaagaaaggagagaacaagtatgagtgaataccaacttatgacagaagaccagagagatatggtgaagctggtaaaagattttctgatgaaggagtatctgccacacgtatctgagtacgaggctaagggagagtatccactggagtttcataagaaactgggagaacttggactttttgcaatggatgtaccggaagagtacggcggcctgggcttagatgcagttactacctgtctgatccgtgaagccatcggctatgtagacgcaggctttgcatcatcctttgcagcatctacctttggtatcaaaccggtcctgttagcaggaacagaagagcagaagaaagcatacggcgcaagactggcagagggacagatctccgctatgtgccttaccgagccacagtccggttctgatatgggtaacacaaaatgccgtgcagtaaaagacggtgacgagtatgtattaaacggaaccaagtgctttatcacaaacggtggtattgctgatatctacacagttgcagcatccacttcaccggagcttggaagcgcaggtatttcccttttcattgttgaccgcaatactccaggtgtcagcgtaggaaaagaagaagacaagttaggtatccgtacttccaacacaacagatgttattttccaggatgtaagaattcctgcaacaaacctgatcggagaagaaaacaagggatttgccatcagccagaaacttcttgcaagaacccgtcctaccggtatggcatctgctttaggtgtagcccagagagcactggatctggcagttgactacgcacagcagagagttacttttggaaagccaattgcaagccgccaggcgataaagtttaaactggctgatatggagatcagacttcagacagcaagagcacagctcttctacaatgcacagctgatcgacaaaggcatttatgatggaatgttaggttctgtaacaaaaacctgtgtatctgaaatggtatttgatgttgcaaatcaggcactgcagatttttggtggttatggttatagcagagaatatccggtagaaaaactgttaagagacgcaaggatcttctcattgtttgagggaaccaacgaaattcagagaatgatcattggtggaaccttagtgcctaaaaagagaaactaagaaagcagatagaatgattgaaaataagggggaattacgatgctttggaaagaatatgaagacgtgcttctggaaagagaagacaatgtagctactatcttattaaacaatccggcaaacatgaacccggtaactgtatctactatggatcatctggtagacgctctgactctgtgtgaggaagatgatacagtccgcgtgatcgtacttcgcggtgccggcggtaacttctcagcaggcggaaatgtaaaaggcatgaaggaacgtctggataaaggcatcaataccacaaaagaaggcatccgtgcaggcggtgaattcatgatgcgtcttcgtaccatcaacaagccaaccattgcctggatcgagggcgctgctgcaggagccggtatgagcatggcactttgctgcgactttgctctggcagcagaagatgcaaaaatggtatttgcttttgtaaatatcggtttcgttccggactgtggtatcacccatatgcttacaaagaatgtgggccgtgcaagagccacagacctgttaatgggtggacgccgttttacaggtgcagacgcagcaaaatggggaatgatcacagcagcagctccaaaggaagaactggaagatctggtaaagaaatatatcaagaaatattcccagggacctgcagttgcctatgcacagatcaagagaatgatcaacagctgcactatgagagaattaaatgcctgcatgcaggaagaagtagaagctcagttcatctgcagcaagacagaagattacaggatcgctgttgaagcattctgcgaaaaaaagaaaccggaatttgtaggtagataggagagataccatggagaaaaagagtatcattaatgttgatggccgtttctattatggctgggtcatgctgatctgcggatttatgaccatgtttatctgttatgtaattaaagcaaactgtacttccttattctataccccgatctgtgaagaactgggcgtaacaagaacggtttacacacagaccaataccgtgcttaccatctgtatgctcatcggttcttcctttattggaaagatctacaaaaagtatcctgttaaatatgtacttacaggctgtgtaggcctggcttccctgtgctatctgggaatgtcccgtgcaaccgctatgtggcagttcttattactgtccggtatccagggctttgcatgggctggcgcaaccaaccttcctgtaggtatcatgatcagtaactggttcggacctaaggtaaaaggtactgcaatgtctatcggtatgttaggtagtggtgcaggtgctctggtatgggtaaactttatcagtaagatcatcgcaggcagcggctggcgtacagcttaccttgcaatggcaggtgtaaatgctttaatgatcccgattgctctgatcctggttgtaagtatgccaagtgacaagggatttgaagtacgtgtaggcgatccttctccggaagaagtagcaaaagcaggcggtgtttccacacagaagacaggtatcacaggtactcaggcattaaagacaagccgctggtggttccagtggatggcagctatggttaccatgatcggcgcatccgcatttaactcacagtgtgtagcttacttcacagacttaacaggtgacaaggcctccgcagcattagtttactccggtgctttaggaaccatgatcttaggtaagttcttattaggtgtattctctgatgttcttcatattaagagaactgctgtattggctccattgttctacgcaggcgtatttatctgcatggcactggcagcaaccaacatgggctttacaaagggtatgactttattctacatgatcggtggtgctgttccttctgttatccctgcactgatcacagtacataactttggtgataaggaattcagcgttatgaacggctggatgaacatggcaggaaacgttggacagatcattggaccgaccatcgcagcatttgtatttgacgtaactggtacctaccgtatggcatggatcatctttgcagtattaatggtagtagtagcactgttatactttatgtctaatatcagcagcaagaagcagatcgaagaaatgggttatgtaattccacagtagtgaccacatgacttttaagaggtgaatgattatggctgaagaacgtaaactgcccttacagggcctgaaagtagtagaactgggtactcattttgcagtacccagcgttacaagaatgctggcagactggggcgcagaagtaattaaggttgaaaatgtaaaaggtgacgcatggagaattgtaggacgcaatcagaaatgcccgattacagatgaagaaaatccatttttcatggttccaaatgcaaataagaagtttgtagcattaaatttaaaagatccggatggaaaagaagcactgatcaagctgatcggttcagcagagatctttgccaccaatatgcgtatgggcgcactgaccaaactgggatttgactatgactctatgaagaaactgtatccgggattgatctatgtacactttaccggatatggatacaagggaccggatgctgcaaagcctggttttgactcggttgcattctgggcacgctccggatccatgatggactggggaactgaaggaaacttcccgttcttagctccaacaggtgccggtgatgccatggtaggttctatcctgtgtgcaggaaccctggcagctctgatctccaagagagaaacggggcagggtactctggtatcttcttccttaatgggcagctccatctggtacaacaatgcagcggttgtttctacccagtatggcaataaattcccgaaagacaaggatcatcctgctaacccctttggctggcagtatgagtgctctgacggtgaatggctgatgatcggtgttgtagattacgcagacgcatatcgcaagatcttccatctgtttggcagagacgatatgttagatgatgaaagatttaacaccatttctgctgtacagcagcatctggatgagtttatgccgatcctgcggggatatttcaagaccaagaccagagatgaatgggtagatctgatcgcaggattaaacattgtagtaggtaagatcggtcacttaaaagatctggctacagatgagcaggctattgcaaacgaattcgtacaggatgtagagttcccaagcggaaagaaggttgctatgccgactgttccgattgaattttctgcttacgataccaagagcaagtatgaaaagacaggagagatcggccgtgatacagaagccgttctgggagaagttggttatacaaaagaacaggtagaagcactgcgcagccagggtgcagcgaaataaattataatgttctttcggagaacatcaaaatgtcagggactgtgctgtttcagaacagtccctgtgtttacagttataacagaaaacaaagctgtgtctgtaaaagttgacaggaaaaatcctttacgataggataataatagtaaaaaattgggaattatctttataaattatcatacagatataaaggagaacactgctatgcttataaaaaacgacgaaagctgtaattctgaaaaaacaatccttcgctatcaggaaaacgggatcgcggatctgctggccagtgactggtacggcattatgctcctatctcccggcgggcgggtatatctggataattataatgatattcatgggatcggcaatgatgttcctttggagtttgtaagaaattgtgtggaatgggacagcctgatccataacaaatctatgacttatacctataaagaatggaatttcctgatctactctattcgtcagacagacaagggaaactgcgttttctttctgcattgcaggaaggataagccctttgatgcaagagatgtaaaatggtacgagctgtacagtgccgtaggccagcagagagtgcttctggaaaatgaactgatccaggagaaaaactatttaaacagtatcctggaaagctcggaaggctgtattgctgtagtagatgaggataataacattgtttctgccaatgatgaggcaaaggctctttttggaaataacttaagccagacaccttccggagaaatgttatccctcatcaaagcagtgaagcaggtcctttcccagaaagaaaagatcgttcttccacgtatgatcgtaaacgggacggaaaatgaatttggcttttctatttacaaatttatactgacacctttgcgaagcagcaagggaagagtaggctgtgtcgtagtggtggcaaccgacattacccatgatttcatcaataaaagacgggcgacccagaggcagaatttccgtatggcaggcaatattaattttgagacagcaaaggaaatgcgtacccctctgatgaacattgaaggatgtgccagccttttgaccgatgcagtgggagataacaaggactcaaaagaacttcttacctatataaaagaagaagtaaatcatatcctgcagatcaataaccggatgctttcattttccaacctgacccaggaaaatacctatggtcagatcgatgtaaatgaggtgctgaaaaactgtgtttctgcgttgtatacacagaggacaaagaagaaactgagtattgaaacaaaaatgggtgcagatctgccattagtacgggcggaaaatgcggatatccagcagatcttttttaaccttctgttcagtgcctttgacaatgcaaaggaaaaaggaaagatccaggtagatagtcattatgatgaccaggcaggagagatcgtagtagattttgaacatgagggaagcgggaatgttttagatgaccgtcaattgtgccttcagattaacggaagggaaaaagggcagatcgatattccgttccttatggcgaaaaaaatggtattggactgcggtggacagctgttcatccaggagagagaggacggaggcagcgtgcggacagtgaaatttccctgttcgtagaaaggaccggaggtagaggaaaatgggagaaacacttaccatgaaacggatactggtggcggaccattctgaaattgccaaccgcatgttttgcgccggactttccaaatatggtttttctgtcagcgctgtgtctacaacagaagaactgatccataaatgtaccacagaagagatcgacatgctgcttttggatctgtatttagagcagaccagtcagatggaccagatccattatctcagagaactttgcccggaaatgtatctgatcgtaatgagcgatgagcctgatatttccagtgcagtacagaccatgaaaaacggggcagatgattttattgaaaagccctgtgaccttgatacgatactgaaaaagatccgggaactgttaaaaaatgaaagagaactgaaaaaagaaacgaagcagccggcagatgagatcctgcctgcagcagaccgggcagttcagaagatcgaggaagtagtagcaaaagtaaaagattatccaaccaccatactgatcacaggagaaagcggaaccggcaagactatgctggcaaagcggatccataagaccagtgtgcgaaaggacaggccctttgttcatgtaaactgttcagcgatccctgcggaactgtttgaaagtgagctgtttggctatgaaaaaggagcttttacaggagctatccgcatgaagcccggcaaatttgaagcagcgggagaaggaaccatttttttagatgagatcggactggtgccatttcatttacagtccaagcttttaaatgtacttcaggagcgcagctttgaacgggtaggcggaaatgaacccattgttatgaaggcaagggtgatcgcggctaccaatgctaatttagagcagtgcgtggaaaacgggaccttccgccgggatctgtattacagactaaatgtgatccagttagagatgccgcctctccgctacaggagagcagatcttaaaactcttactgaaaagttcataaaacgtttttgcgagagctttggaaaaccagtgccggagatcacagctgatttctggaagactgtaaatcagtacaactggccgggaaatataagggaactggaaaatgccattgaaagcgcagtagctctttgcggagaccagctttcagcagactgtcttcctttaagagtgggacaggtacgggcagaagagcggggagaagaataccccaagaaagaagtacctcataacctgaagctttatttaaagcagcaggaagatgccattatacaggaagcactggataaatttaacggccgtaaagaaaaagcggcccagtatctgggaatttctgaccggactctcagatataaactaagcaacatgggaaaaacaggaaaagacaacgatagtgaggaattagaatgagcttgtggaaagtatttgaacgttctgtaaggctgtatgagaacaaaacagccctgatctttggggaagaacggatcagctacaaacagctttatgaaaagagctgccacatagcagatcatttatatgagatcgcaggcggaaaagagcagcagaaagtatttatcctgtcaaagaattctattgacatggtagctttgatgcttgcctgtatgcgccgtaatctcattgcctgcccggtgaactggcggctttcagccagggaactggcagtgatcttaaaaaaccacaattatgtgatccgcatctgtgatgaggaaaacaggggacttttagaggctgcctgcagctttatcccggaagagacctttgtaaaagcagatcttagggatcttacagatgataaaaaagcagttcctgccgtaccggcggcagacccggacggggaagatattgttatccagctttttaccagcggaagtacgggaacaccgaaagcgatcggccacaccaatgcaggtatgaccgcttacatgtatgattatatgaaggagtccagatgggagccggaggatatttatcagaccagtgccaatctgttccatctgtcagggctttctgttctaaccagcctgatggtgggaagtacaacggtattttttgcaagatttgatttgatagaatttttgacagtcatggaacgggaaaagaccaccaggatcagttttgtgccgactctggtgaccagactgttaaatgacagccgtctgaaaaactttcattttgacagtgtaaagaagatcgtatacggcggttctcctatgaactatactacggtagtgcgggcaatggagcatttccactgccagttagagcaggcgtatggagcaacggaaagctgctgtatgtccgttcttttgccggaagaccacagggactgtgcaaaaggtattttagataagaaagtattaaattccgcaggaagaccccttccaatggtaaaggtaaggatcattacggaaaaaggctatgagaccaatggtcaggcctgcggagagattgagatcaaaagccctttcctctgttcagaaagtatgtccgtaccgggcaccagaacagaagacgggtattatcctaccggagatataggctatatggatgagaaaggttttttatatctggtagggagaaaacacgatatgatcatcagcggtggtgagaatatctatcccaaagaagtggaagactgtatcgcttctttgaaacaggatgtaaaacaggtctgtgtgctgggaatgccggatccggtctggggagagcaggtcactgcctgtatcgtcttaaaagaaggttctaaactgacagaagatgatattgtggcatggtgtaagaagcacatagcaagttataaaaagccaagaaaagtaatcttcttttcacagcttcctgaaaacgccaatggcaaggtttcaaggatcctgttaaaagatcagatccagaaaggggaaataagatcatgaaaaactattttgatgtagctggcaagtatgcagttgtaacaggagcttcttccggtctgggacgtcagtttgcgctttgtctggcagagcagggatgtaatgtagccatcgcagcccgcagagtagagcgcctggaagaagtaaagaaagaagtagaagcttacggcgtaaaatgtctggtgctgccatgtgacgtaactgatacagaacagatccgtaattccgtagacaaggttgtaaaagaattcggacgtattgatatcctgatcaacaacgcagcagcttcttttgcaacccctgttgtagagactaccgatgaccagtggtacaatgtaatgaagactaatgtagacggcgttttcttctttgcaagagaagtaggaaaggttatgatcgcccagaactacggaaagatcatcaacatcggctccttccactgccaggtaaccatgaacggtgttccacgttccggttattctactgcaaagggcgcagttttaatgatgtccaaggcactggctgcagagtgggcaaagaataacattaccgtcaatgttttaggtcctggatattttgcaagtgaaatgtctgcaaaggttgcaaatgaagcatatgaggcttctatccgcaacaactgcccaatgggacgcagaggaaatcctggcgagttgaacggtgctatgctgttccttgcatcagatgcatccagttatgtaacaggacagcttctgttagtagatggaggctggaccattgtatagtgggtctataataaataaaatataaaaaaacaggaaagactgtccttatgtaactgtaaatacagatacagaaaggacggtcttttttatgggtaaaaatcagaaggacaaaaaagaaggaaaacaggaaaataaagcggcagccccgtcacaggggcgaaaacttcaggaaaaagagattgaagagaaagaagatacccacctgaaaaactgggggcagatgactttggacggaaatgaaaaaaagagaaagatccatcttttatccatcattggagaagtggaaggacatgaaaatgcttcaggcggttccaagacgacaaaatatgaccatgtgcttcctgcactggctcagattgaggatgatgccacagtggagggactcttagtgcttttaaacacctccggcggtgatgtagatgccgggcttgctattgcggagatgatcgcgtctatgagtattccggtggtttcccttgttttaggaggcagtcattctattggggttcctctggcagttgcttcggattattcttttatcgtgccttcggggaccatgatcgtacatccggtccgtatgagcgggatggtcattggaacagcccagacttatgagtattttgcaatgatacaggaccggatcttaaattttgtttcttcccatgcagatattgcctacgaccagttaaaggctttaatgcacaatacaaaaatgctggcaagggatctgggaaccgtgctggtaggacaggaagcagtagatgcaggtcttattaaagaagttggagggatcagggaagcattaaaaaagctgtatgagatgattgatgagtcctgtgcaaaaaaacaggggttttaatttttaatggggcagtgtaaactataaagagaagttcgccaggcgcgatttggggaggatagaatgaagatttttgatttacactgcgataccattgaagcattaaaaaaacacaatgaaacctttgataacagtaccacccagtttaccatgaagggacaggaaaacttagaaaaagcagtccagtttctggctgtgtggcttcctgatcatttaagaggccaggaagctgtggattttaccaatggatattatgaatatatgacagaggctgtgggaaaggttgcagacagggcggctttagtagaagatatgtctgatctggacaggatattaaaagaaggaaaatgggcgtttatccgttcgattgaaagtggtgccgcacttggcggaaaactggaaaatgtagatcattttgcaaaactgaattttaagatgatgacactgacctggaacgggatcaatgaactgggaagcggttcccagtcagaaatgggtcttacagattttggaaaagcagctgtgcgccgtatggaagaagtggggatgatcgtagactgttcccatttaaatgatgcaggttttgaagatctgttaaactgttctactaaaccctttgtagcttcccactcgaatttacgttccctgtgcagtcacagccgcaatctgcgggatgaccagtttaaggagatcgtggcaagaggaggcctttgcgggatcaatatttattccagatttcttacagagccggatgacctgggagccgggcagaaggagcagctccttcgtctcattgaccgtatgttagaacttggaggagaagatgtgatcgcctggggcatggatctggacggcggagttacctgtgatccatccattggcactccttatggtgctgcggcatacggagaatatctggtggaacatgggatcagccgtgagatcgtagacaaactttcctttgataatgcctaccggttttttacgaaagctttgtgaaaaatcaaaagcgttgcaattcttacgaattttttgtatactgtaaatagtctttaaaatcagagaacatatgttctctgagaacgttttatagaaatgggaggctatgatttgtggctgattcagtaaaaaaacagcagggaagaacgggtaaaccgggaagacctaagggaagtacgacaaaaaaagaaaccacagcaggaaacagcagaaaacgatccacggcatccggcacaaaaagaagttcctcaagacaggcgccggaaccggtttatgaagaagacgatttagggtttatgagggcagaagtgatcattatctgttcttttgccgttgccatcctcttatttttaagtaactttggtttatgtgggatcgtaggacagatccttaaggggatacagttaggactgtttggcatcctgggatatcttttaccgatcctgatctttgtaggaacctgttttcatttatcaaatcagggaaatatccatgcagctattaaattaggagctgtgatcggggcgctgatcaccctttgcggactgttccagttgctttttggaaggatgcctcagggcggatctgtaatgcagatctatgcagatgcttcaaatggaggcgccggaggcggtctggtaggcggagcgctggctatggctcttatgttctttgttggaagagcaggcgcttatctggtatttttagtaatcctgatcctgtgcatggtatgtataacaggtaaatcctttgtttcggcagttaagcagggcagtggacgggcttatcagtatgcaagagaagatatggaccgtagaaaagagatccatgcccagagagcagaagagcgtaaactgttaagagaagaacagagagtacgtggtgtcaacttaaatgccaccagactgacggctgtagatgaaggcagacgccctgttccggaagatgcagaatacgatgaggaagcttttgagcgggagtttggtacaaagcagcaggctgctaaacctgagatggatgagatcccggaggaaaaaccggcagctacaggaaagaaccgggtagtctatgaggaagaagaggagatcccttctccagcagacgagttcaggggcaagatccagatgccatccggctatgagaaaaataaggatgaaaaggatgagacagaggctcttgctgatgagttagaacagcagtatgagacgatccacgttccaaaagatcgacggaccttagaggagatggagataccggctcctgatgtgatccctgccggacggcccactgcctgggagcagaaagtatctgctgtgtctgaacatgcgataaaagaagaggaagaaccccttccaaaagaaatacagagagttcctgttgaggaaccgttgtgggatgaagatcttccggaagaaacagtcagtttggctgatctggaggaagagaaaagagcagctgagaaagcaacggagacacctatatacaacagcggaaaagctgaatatgaggaaaaatctcacataaatgatgagaaaaaacctcaaacgcaaagaggctttgaacagtcagaagactgggaagagatcacagaagagccagaggagtccccctgggatccaaaactggatgagagtgtttctcctgatccactggctgctgcttccggttccatctatgtaccggaggagaaaaagcagatagtgacagcttccggaaaagtgatcgaagcagaaacagatctgttaaagaagaagctggaaagcacccgggcggcagaagctgctgcatctgtgccaaaggcagatccttttatggcacctcgatcttccaatgaaaaagtacggatcacttcgccttcagaagaagagtcatctgaggcagttgccaaagagatcgcaaaacaggaagtagaaaaagaatacatattcccgccaacggatcttttaaagaaaccggtgagaaataataatgctttctctgaaaatgaatataaggcaactgctattaaactgcagcagacgttacacaactttggtgtcggtgttacggttaccaatatcagctgcggtccttctgttaccagatatgaattactgccggaacagggggtaaaggtaagcaagatcgtaggccttacagatgatatcaagttaagccttgcagctgcggatatccgtattgaggcgccgatcccgggaaaatctgcggtgggtattgaagttccgaataaggagaacaatatcgtatacttaagagaacttcttgactccgactcttttaagaaccataaatcccgccttgcctttgcagtaggtaaggatatcggcggacaggtagttgttacagatattgccaagatgccacaccttttgatcgcaggtgctaccggttctggtaaatccgtctgtatcaataccctcatcatgagtattatctttaaatccgatccaaaggatgtaaagatgatcatggtagatccgaaggtagtagagttaagtgtatacaatggtatccctcatctgctgatcccggttgttacagatccgaaaaaggcatccggagcattaaactgggcagttgcggagatgacagaccgatataagaagtttgcagaatgtaatgtaagagatttaaagggatacaacgaaaaagtagacaagctgacggatattccagatgataaaaagccaaagaaactgcctcagatcgttatcatcatcgacgagctggcagaccttatgatggttgcgccgggagaggtggaagactctatctgccgtctggcacagttagcccgtgcggccggtatccatctggtaattgcaacccagagaccatctgtaaatgtcatcaccggtctgatcaaggccaatgtaccatccagaattgcctttgcggtttcttccggtgtagactcccgtaccattattgatatgaacggtgcggaaaaactgcttggaaagggcgatatgctcttttatcctgcaggtttcccgaaacctcagcgtgttcagggcgcctttgtctctgatgaagaggtaggacgggtagtagaatttttaacagaacagggaatgactgcccagtataatgaagatgtgattagccgtgtggctgcgccttcttcggatggaggcagttcctcagccggacgggatgaatattttgcccaggctggtaaatttattattgaaaaagacaaggcatccattggtatgctgcagagagtctttaagatcggttttaaccgggcggcccgtattatggaccagctggcagaagccggagttgtaggcgaagaagaaggaaccaagccgagaaaagtattaatgagcccggagcagtttgaagaactgcttgaacagggcagataatatcattatcatatcattattcatcaaggaggaagtacctatgaaaacagatattgagatcgcacaggaagcggtaatgcagccaattaaggaagtagcagcatcttatggtattggagaggatgatctggagctttatggaaaatataaagcaaaactttcagatgaactctgggagaaagtaaaaggacgtccggacggcaagctggtcctggtaacagccatcaatcctacaccggctggtgagggaaagactacgattactgtaggtctgggagaagctcttggcaagatgggcaaaaatgccatcatcgccttaagagaaccatcccttggaccgtgctttggcatcaaaggcggagcagcaggcggcggctacgcacaggtacttcctatggaagatctgaaccttcattttacaggtgacttccatgcgatcacatctgcaaacaatctgctggcagctcttcttgacaatcacatccagcagggaaatgcacttggcattgatccaagacagattctctggaaacgctgcctggatatgaatgaccgcgttttaagaaatgtagtagtaggtcttggcgcaaaggctgacggtatggtacgtgaagaccattttgttatcactgttgcatctgagatcatggccatcctctgtcttgcaaatgatatggaagacttaaaagaccgtctcggcaagatcatcgttgcctacaactttgcaggagagcctgtaactgcagcagatcttcacgcagttggttctatggcagctctgttaaaggatgctttaaagccaaatatgatccagaccttagagcatacaggtgctttagtacacggcggaccatttgcaaatatcgctcatggctgtaacagtgtacgtgctacaaagacagcgttaaaactttgcgatatcgttgttacagaggctggtttcggtgctgacctgggtgcagagaaatttatggatatcaagtgccgcaaagcaggcatccatccagatgcagttgtattagtagcaaccgtaagagcattaaaatataatggcggtgttccaaaagaccagctttccgaagaaaatctggatgcattaaagagaggtattgtaaaccttgaaaagcacattgaaaatatccagaaatttggtgttccggtagttgttaccctaaattctttcataaccgatacagaagctgagtatgcttatatcaagcgcttctgcgaggacagaggctgtgaatttgccttggcagaagtctgggcaaagggcggcgaaggcggcatggcattagctgagaaggtattaaataccctggaaaataagagaggtgactttaagccactttatacagatgagatgccattaaaagataagatcggaaccattgcttctgagatctacggagcagatggcgtatcttatgcaccggcagcttccaaggcattaaagcgcattgaagaaatgggctttggcaatctgcctgtatgtatggcaaagacccagtattccctgtctgatgatcagacaaagcttggaagaccggctggctttactattaatgtaagagatgcctatgtctgtgccggagctggctttgtagtggttcttaccggttccatcatgactatgccgggacttcctaaaaaaccggctgcagaaggcattgatgtggtaaacggaaagatcaccggcctgttctaaaagtggatccccctttttgggggatcaccggcaaatatagcagaaacaagaggtttaaaacatgatttttcgtgattggctgaaagaacttgactatacgctgcttcagggaagcgtagatgtagaaacagaagatgtgatctatgattccagaaaagcagcgcctggaaaggtatttgtagcaatgaaagggatccgggtggatggacacagtttcattccccaggtgttaaaagcaggtgtgcgtgtcctggtaacagaaagaccggtggaagaagagctgaaaaacagcggcctctctgaggatgaattaaaacaggtaacagtggtcatggtagaagaaggccgtcatgccctggctcttttatcagctgcccgttttgaccatccggctaaaaagctggtaatgatcggtgtaacaggaaccaagggaaagaccaccactacccatatgatccgtgctattttactggctgcaggaaagaaagtgggtatgatcggaaccaccggtactgtgatcgggtatgtggtgactcctaccttaaataccactccggagtcttatgaactgcaccaggcatttgcgcagatggtagaagccggctgtgagtatgcagtgatggaagtatcctcacagggtattaaaatgcaccgtacagatgggctgtattttaactatgccatctttaccaatatttccccggatcatattggaccgggagaacatgctgattttgaggaatatctgtactataagaccagactgttaaatatgtgcggtattggtcttgtaaataaagatgatgaacatgcaccgcagatcataaaggcagcaaactgtgaactttatacttacagtgaagaaagcaaagaggctgattttgtggcatctgatatccgctatgtatcccagcctgattttgtgggaacagagttccacatttccggtaaatatgatatggaagtaagactgggtatcccaggtctctttaatgtggtaaatgccctggctgctgtcagtgtatgcagctttttgggactggatcaggcgcggatcagccatgccttagaaaatatccgtgtaaatggacgtatggagatcgtctataccagcgaaagatgtacggtccttgtggattacgcccataatgcagtgagcatggaaagcctgttatccacactccgggattataagccaaaacgtctggtatgtgtgttcggctgcggtggaaaccgttctaaggaccgccgttattccatgggagagatcggcggaaagatggcagatctgagtatcattacagcagataactcccgctatgagaaagtagaagatatcattgcggatatccgcggaagcattgaaaagacaggcggaaagtttattgagatcccggaccgcagggaagccatccgctatagcatccttcatgcacagccgggagatatggtagctgtcattggaaagggacatgaggattatcaggagatcaatggtgtccgccatcatttcctggaccgtgaagtgatcgaagaaacagtaaaagaactgggagagaaggcataaagatgaaaaagataacagcagaggctcttgcgcaggcagcaggaggcgttctggcccatgagggaaatgagccggtagcagagcatatcagcctggattccagaaaaatggcaggaaatgacctgtttgtccctattatcggcgagcgggcagacggacatgattatatctgcatggccatcggaaatggcgcaaccgttgtatttaccagccgtcataaaaccgaagaggaagtacaggaagccattcttacccagtgtaaaggtgacaaagaaaaagagacagctgcaaaggcagctgcctggatctgcgttcctgataccagaaaagcacttcaggattttggagcttattgcagaagaaacaatccgatcccgttagttggcattaccggaagcgtaggaaagacaacgacccgtgaaatggtagcggctgctttaagtgcaggtttccttgtatacaaaacacctggaaacagcaacagccaggtaggtgttcctattactgttgcggaaattccggaaaatgcagagatcggcgtgatcgagctgggaatgagtgagccgggagaaatgacccgtattgcaaatgtagcccaggtaaactgtgcggttatgaccaatattggagtagcccatattgaacagttaggctctcaggaaaatattttaaaagagaaactgcatatccaggatggaatgtctgaaaagggaactctgttcttaaatggagatgatccccttcttagagatgtagttccggaaggcggcagaaaaaaggttctgtacggactttctgaaggctgcgattacagaggcgaagacctgcacttagaagaaggttatcctgtatttacagcagttcatggagatgaaaaagtacagctgcgtcttcaggtcatgggtgttcatatggtacagaatgccctggcagctctggcagtagcaggagaatacggtatttccatggaaatggcagcagaaccgctgtgccgttttgaaggctttaagggacgtcagcagatcgtacatctgaatggtgtcactgtgatcgatgacagttataacgcaagcccggtttccatgaaagcggggatcgaagtacttggctctttgccatgtgaaggaaagcggatcgctgttcttgcagatatgaaggaattaggaccggatactgtaaaattccatcaggaggtaggtgctttcttaaaagagcatcctgcagatcaggtagttttatatggtgaactggcaaaagagatcggtgccggtttaaaggcagccggtggagatattcctctgacagaagtaaaaagcctggaagaactggaacaatggttggatgaccatgtagctttcggggactgcctgctgtttaaggggtccaacagtatgggactttctaaggcagtagcatatatgaaagaaaagtaagcagaataaatatccgtctgcttttgcaggcgtggtttctaaacgcgatatttaggaaatatgatagtattataaggagaagttatttatcattatggaattaacaagagaaaactacaacgaaacagcaaaggaactgcttacatttttacagaacagcccttcctgcttccatgcagtgaaaaatgtagtagatatgcttacagcagccggttttacagaggtgaaagaggaagaaagttggaaacttgaggctggcggccgttattttgtgacccgcaatcagtcttctgtgatcgcatttaaggtaccgggaaaagattttaagggctttcagatcatagcaagccacagcgattccccaacctttaagatcaaggaaaatccggagatggaagcagctcactgcatcaagttaaatgtagaaaaatacggcggcatgatctgcgcaccatggtttgacagaccattatccattgccggaagactggtagtttctgagggaagccgtctggtatccaagctggtaaatgtagaccgtgatctggtgatgatcccaaatctggccatccatatgaaccgtcaggtaaatgacggctatgcttacaatgcacagaaggatatgcttcctgtatttggcagtctggaagcaaagggaaccttcatgtctctgatcgcagaagctgcaggtgtaaaagaagaggatattttaggacatgatctgttcttatacaaccgtcagccaggaactatctggggcgcagatgagaccttcctttcctgtggaagactggatgaccttcagtgtgccttctcttccgtaaaagcagtgatcgaaggagaaaacagctccagtatttctgtagcagctatctttgacaacgaagaagtaggaagcggtaccaagcagggcgcagactctactttcttaaaggatgttttagagcggatcaacgacagtttaggacgtaccagagagcagtatcttatggcagttccttccagctttatgatctctgcagacaacgctcatgcagtacatccaaaccacgcagatgtagcagacccaaccaaccgtccggctattaacgaaggtattgtaattaaatacaacgcaaaccagaagtacaccaccgatgctgtatccgcagctgttttcaaagcattatgcaagaaagtacaggttccggtacagaccttcaccaaccgttctgacattgcaggcggttccacattgggaaatatctccaatgcccatgtttccttaaataccgtagacattggacttcctcagtttgcaatgcattctccttatgagacggcaggcgtgaaagatacctgctatcttatcaaggcagcaaccgaatttttcaacagctgtattgtagctgagggaaatggaaattatagtctgggtgagtaagagacaactcctctgttgggaaaggtaaaatagaataaattcaaaaaagcagggcattctataaataggaggccctgtttttgtatgtaaatgcgcatggccacttcagcctcttggggactaccctggttctcgctcggctccccagggctttgcccatctgcgcccgtcagggcgcggcctcacttctacttgaaaaaacttccctataagccacattgcgtttgccacccaactatgctaaaatattaacggttagaaaagactaactaatgtgaaatgatcatggccaagtcccccggtatgacctgccgggggaaaactccgttgccagaaaggacaaaattatgaagcatttggaaatcgaaaaagtaatcggaagagagatcattgattcaagaggtaatcctactgtagaggcagaagtttatcttacagacggaacggtaggcagaggaaccgcaccaagcggcgcatctacaggtgagtttgaagcactggagctgcgtgacggtgacaagagccgttttggcggaaaaggtgttttaaaggcagttgagaatgtaaataccgttatttcacaggtattaaagggaatggatccttctgatgtttatgcagtagaccgtgctatgatccaggcagacggaacaaaagataaatcaaatttaggcgcaaacgctattttagctgtatctatcgcaagtgcaagagcagcagcaaatgcactgcagatcccgctgtaccgtttccttggcggagcaaacggaaacagacttccacttcctatgatgaacatcttaaacggcggcgctcatgcagcaaataccgtagatgtgcaggaatttatgatcatgccggcaggcgctccaagtttcaaagaaggactgcgctggtgtgcagaagtattccatgcattagctgccttattaaaggagagaaaactggcaacttctgttggtgatgagggcggttttgcaccagaccttggaagtgatgaagaagccatccagtgcatcttagaggcagtaaaacgtgcaggttacgagctgggaaaagacttcgtactggcaatggatgcagcttccagtgagtggaagggcagtgtaaagggcgagtacatccttcctaagtgcggaaagaagtttacttccaaagaactgatcgcacactggaaagatctgtgtgagaaatacccgatctactccatcgaggatggtctggatgaggaagactgggaaggctggcagttaatgaccaaggaactgggcgacaaggttcagttagttggtgatgacctgtttgtaaccaatacagagcgtctgtccaagggcatcagccttggctgcggcaactccattctgatcaagttaaaccagatcggcagcgtttccgagactttagaggctattaagatggctcataaggctggctatacagcaatcgcatcccatcgttccggtgaaactgaggataccaccattgcagacctggctgttgcgttaaatacctgccagatcaagaccggtgctccaagcagaagcgagagagttgccaagtacaatcagctgcttcgtattgaggaagaattgggtgcagctgcacagttcccaggctttggcgcttttaatacaaaaagataaatacagccgaaacagtatataaacgaactgatacagataggtacttgttttacagataaagagtgtgctagaataaaagccggactggctgaaagccagcagacaaaagataaaagttgaggtagttcttatgagtttttccggcttatttcagacacagggaatgctgtttctgcttttgctcatcgggtatattttcgggaagaagggactggcagatggcacaggcaaaaatctgctgactgatcttgtgatctatgttactcttcccggaagtattatcaaatcctttcagatcgagtttaaccaccagatcctgattgcctgtatgaccattgctattgcggggatcgtaatacagacaggaagctctgttcttggaatgtttctttataatcactatggagacagcaaaaagaaagtgctgcagtatgccaccatctgttccaatgcgggaattctgggaaatcctatcgcggaagggattttcggacagatgggaatgatgtatgcgtccatttatgtgatcccacagcgtatttttatgtggtctgtaggtcttacttattttacagaggcaccggataagaaaacgctctttaaaaaagtagccacacatccatgcatcctgtctgtatttatcggatttttcctgatggtaacacagatacagctgccggaagtactgaacgtgaccataaaaaatattgccggtgcaaatacatttcttgcaatggcactggtgggcgtgatcttatccagggtaaaaatgaaggaactggtagatcgtgatactatctactatgcatttatccgtctggtattcataccccttctggtgtatgttggatgcaaactggctggtttagatgatctggtaacaggtgtatctgtagttttagcggcaatgcctgcagccagcacaacagcgatcatagcgtccaaatataaaaaggatgagaaatttgctacccggtgcgtagtgtcttccacactgctttcactggtaacagtacctgtatggtgtctgtttttagtataattggatatggaacgtgaaaaaagcagcgtacctgttaatcttaggaaagatccataagaccaggtatgctgcttttagtttatatgttcacaatacgcattcagcgcagccatatttatttgctggctttttctattagatttttaaataagccacgcattcttggttcgctgtcctgaagctcttccggatgccactgcaccaggataaactgtccgccatctgtttccattgcttcgggaattccatcagctgtatgggcggtaatcttcagaccttttccaggttcttttacgcactggtgatgcatggtgttggtatacaccggttctgcacctaaaatagaagctaaatggctgtcagcatccatggtaacctgatggatcagataatcgcggttctgtttctgggaatggagcatatggtcctggttcttataggaaagatcctgataaagactgccaccaaaagctacgtttacaagctgcagtccacggcagatgccaaggaccggcattttatgctctaaggcatagtttgcagcatgaatccagaaacggtccatggcagagtccaaagaacctaaaaggggagatggatcttcgctgtaaaaacgtggatccacatctactccgcctgggatcagaagtccgtcacacatggcaagaaccggatccatatctgccggatcttttaaaacaggcagaagaatggggatgcctcctgcattttccacacctgcacagtaagcatgatttacatagtcagcaggcaccggagccgggccgccgttatttgacatatgggcaccaaggatgccgatgatcggttttttcatttgtatatatcctcctgggtagtatttttcaatgcactgatttatattttacacttattttgtgaaaaatagaagtaatttataattgactaaccggctgatatgggaatacaatattggtacaacaaaggaaattgactgacaatattagttatgaataacttaagttagtcaatattaattgatttagggggcatatatatgcaggcattaacagaaataaagcctggagagagctgtaccgttaaatggatggtgacaggcgcaaggatagcagaatggatggaaaaacatagtattacagaagggagccggatccgggtcatacaaaactgtatgggggatctgatcattggaactgaaaaggagaaagtagcggtaggaagagagattgcttttaggataaaggtataaaattcatgtaaagaagaggtaaaagacaggacaaaaaaatgtaagttattgagaaatgttggaattgactaactgtgggttgatttgttagagtatcaaatgaaaaaaataaattataaaaatacctgaaattaaggaggataaaaatatgatgttagatatcggtaaagtaaagaagattggtttattcgcaagtggtgtactgttcggtacagctggtgttaaggttttaggaagcaaggatgctaagaagttctacatcaactgtctggcagctggccttcgtgctaaggactgcgttatgactactgcaaccaacatccaggagaatgcagaagatatccttgcagaagctaaggagatcaacgagcagagaaacaaggaagaagttttcgaggatgagagccaggcagaagagtccttcaaggaagaagaagcagcaaccgctgaggcttaattaaaaactaatcggggcctggggagaaaaacttcccgggctttcttttacagggagcgatatacgtatgaaattttctattaaacatgagattaacggaagagtccgtatccatgtatttcagagaggcgttatgagcatgcgtcaggcggatctgcttcagtactatctggaaacacttccgggagtactgaatgcgaaggtatatgaaagaaccgcagacgcagttattgtttataaaggtgacagagtggagatcctggaaggagtcaggaccttttcttatgataatgaggaattagaggagatcgtaccggtaaacagcggacgtgaattaaacagagagtaccaggaaaagctgtttaagcatgtagctgtacgtatggttacaaagacctgtttcccattctggttaagagcagtttataccacagcaaaagccatccgttatgtatttaagggtatccgttgtctcttaaagggcaaactggaagtagaagttctggatgcaactgctattaccgtttctattataagaagtgactttaatacagccggttctgttatgttcttactgggaattggcgagctgttagaggaatggacccacaagaagtctgttggcgatctggcaagaagcatgtccttaaatatcgagaaggtatggcagaatgtagatggcacagaagtattagttcctgtatccaatattaaagagggcgatctggtaaccgttcatgttggaaatgtgatcccgttagacggtgaagttgtaaccggcgaagctatggtaaaccaggcttccatgaccggtgagtctgttcctgtaaagaaggaagccggctcttatgtatacgcaggaacagccgtagaagagggagagatcactcttaaggtaaaacatgcagctggttccacccgtttcgagcgcattgtacagatgatcgaagactctgaaaagttaaaatcttctgtagaaggaaaggctgcaagcctggcagatgccttagttccgtggagccttggcggtactgctcttacatggctgctgacccgcaactctacaaaggcactgtctatcctgatggtagacttctcctgtgcattaaagcttgcaatgccattatctgttctttccgctatgcgtgaggcaaacagccatcacattactgttaagggcggaaagttcttagaggctgtatctgaggcgcacaccatcgtatttgacaagaccggtactcttacaaaggcagagccggttctggctgatattgttgtgttcaatgatatgaccaagaatgagatcttaagaattgctgcctgccttgaggaacatttccctcactccatggcaaatgcagttgtaaaagaagcagtaaacagaaaacttgtccatgaagaaatgcattccaaagttgactatatcgtagctcacggtattgcaacttatgtaaatggcgagcgtgttgttatcggaagccatcactttgtatttgatgatgagcagtgtatcatcccggatgagcataaacaggcatttgatgaactgcctccatattattctcatctgtatatggcgatcggcggaaagctggcagctgttatccttattgaggatcctcttcgtgatgaggcaaaggataccattgatgcattaagaagccttggtgtcaagaatattgttatgatgaccggcgacagcgagagaaccgcaagagccattgctgaaaaagttggcgttgaccagtacttctccgaggtacttccggaagacaaggctggctttgtagagcgcgaaaaggctttaggtcacaaggtcattatgatcggtgacggaattaatgactcacctgcactttctgctgctgacgtaggtatcgccatcagtgaaggcgctgagatcgcaagagaaatcgcagatattaccatttctgaggaaaatctgtaccagctggtaacattaaaggcgatcagcaatggtttaatgaagcgtatccatggaaactaccgctttgtgatcggatttaacctgggactgatccttttaggtgttgccggtgtgatcgcacctgctacctctgcgctgctgcacaatacatctacactgggcatcagcttaaagagtatgaccaacctgttaaatgaacaggaaaaaagaaaagaatatgaagaggcagaggcttaataaataaagatctgtctggaaaagactggaataaggtgttagaaataatactttgttccggtctttttttgtgccaataatgtgcgtgctcgcttttcccggattttgatctgtataatttgcctgctgataacacattctaaagaaaagaggttttcaggaaagaaaggcagatgaatggatatggagcagaaaaagggaagagccagcattttatttgagcatccaccggttatcaaaagtgtagggacagtgtcaggtaccagggaagggcagggacctttggggcgtttctttgacagtgtggaaccggatgataagatgggaatggaaaactgggaagaagcggaaagtgccatgcaggaaaaggcagcaggtctggctttgaaaaaaggaaagttaacagagcaggagatggattattcgtttgcaggagatcttttagggcagctgatcgctacatcctttggttccggaagtctgcatgtgccattatttggcctgtatggtgcctgctctactatgggagaagctttgggtcttggggcaatgaccgtaaatgcaggatatggaaaaaatgtccttgccatggcatccagccattttgcaacggcagagaaagaattccgttttcctcttgcctatggaaaccagcggcctaaatcagcaacctggactgtaaccggctgcggggcggcggtaatagggaaacatggggaaaagggaattgcccagatcgcagggatcactacagggcaggtagtagacgccggagtcagagactctatgaacatgggtgctgccatggcaccggcggcctttcatacggtaatgcagaatttaaaagatctggagatcacaaaagagcagctggaaggtggctggtacgacaagatcattaccggggatctgggaaaaattggaaaacaggcattggcagatcttttacggaatgagggtctggaagcggaaggatttttaatggactgcggcgtagaaatctatgacaaccagaaacaggatacccacgcaggaggaagcggctgtggctgcagcgccttagtccttggggctttgatcctgccaaatatccaggctggtatctggaaacgggtactttttgtccctacaggagccctgctttctactgtcagctttaatgaaggccagaccataccggggatcgcccatggggtgatactggaacgtatgggaaaataaaatttttgtacgaaggcaaaagatgtaaaaatagatagaagtatgaaaggcaggatgtgaaaatggattatataagagcatttcttgcaggaggtgtgatctgtgccctggtgcagatcttaatggaaaaaacaaaaatgatgcccggccgtattatggtccttttagtagtatccggtgcgattttaggtgccatcggtatctacgagcccttcaaagaatgggccggagcaggcgccagcgttcctctcttaggctttggaaacaccctgtggcagggggtgaaaaaagcggtaggagaggacggtatcctgggcgcttttaaaggcgggcttacggcatcctccggcggtattaccgcagcccttgtgtttggatacctggcatcgctggtatttaagccaaagatgaagtaaagagtggatcagatcaaaaaaacagggactattgtgttatcaaatacaacagtccctgtttttgcgcagtcaacagatcacggttttatgtttgcagtttaaaagcttaatgtttggctcccggtcctgtatattcccattccggcgcagtggtaggctgatagcctggtcctacaggcactacggttgctttggtaggagccgtggtttcaccgccggaattatcattatcttcaatggtaggagagatgatggtggaattgcggccgtggatgttacagtaacctgggatggagaaaacagagtcatccgtagccagatcctcttcaccttccggaagtaccatacataccttggtggtcttggtcgggcagtattcggtggaacgttttccggactctgcacatacggttactgccacatgtttgtcgcagacttcagtaggagccgttccttttgcaaaatattcagtgtagacagcatctcctcttggatcatggtcacatacgccggatacagcacgttttccggatttgcggcagatctcagcagtctccacactgtcaggaaccgtaaatccgggatcttccagaccttcatgtacccggttcatgatattgcgccagatatctttgtggaaagaggttccgccgttgtccacgccgccatgctttaacttctggttgttgtcacagccgccccatacaccggcagtgtaataaggggtaaaacctacgaaccatacgtcattgttgctggtggtggtaccacttttacctgctgcagacatacctgtaagggctgcacgggtactggtggagttaatggatacaccggagcgggcaaatttcctgtttgctttcatggactctgacatggcatctgttaacaggaaagcagtggagtcctttaatacctgcttggtctccggttcattgtcgatcagcaccttgccatcgtggtctaatatctttgtgaaaaatcttggggtggtgtaaacaccgccgtttgcaatagctgcataagcagcagtcagttccatgttggaaacaccttttgtaataccgcctaatgagagagcagcgcccagatcatccttggtaagagaagtgatgcccaggttttctgcatattccacaccaagctgaggagtaacagtttccattaaagtacggactgccacaatgttcatggagtagataataccttcacggatgttggaataaccggtaaaaccacggctctctccccaccagttgcggaaagttttggtgccaatggtataaggcgcgtcatagtaaacggttcccagggtggctccgcaggtatcaatagcaggagcaaatgcagtaagtactttaaaagaagaacctggctggcggtaaacattggtagcacggtttaaggtacggctggctgttttctcgccgcggccgccggaaagggcttttacctcacctgtgtgctgatccatgataaagaaggatgcctgaggctgcaggatcaggttctgacgttctgcgatcacatcatccccgtcttttaaaagccattctttgtaccggtcaatatctgcctggacttcttctttgctgttgtaaagtccttcgaaagaagtgtctcctaaagtgttcttacgataggcacgtaaattttcttctgaataatgctgggtagtgccatctgcatggttgacagaaagacggtattccacagagtatttagcgactgtataattgcctggatcattgacttcttcatctacgattgcctggatcttcggatcctgggtggtgtagatcttaagtccgccggaatataccagattgcttgcctggctttcggtgtagcctaatttcttcattaaggcttctgtcacctgttcgatcagttcgtctgtaaaatagctgtagtgggagttggtctccttggtagcggtatttacattctggatccggtcatatacatcatcagaaagagcattttccatatcctgtttggagatataattctggtctaccatgttctgaaggacgatctgacgtcttgtattgttgttttcaggattggtaatgggattatatcgggaaggattggaagtgatagatgcaaggacggtacactctgcaagagtaaggtcagaaacttctttattaaaataccgccgtgcggcaaccttaactcccagggtattgctgcccaggttaatggtgttcagatagttggtgataatagttttttttgtttcttctttgtttaaaccggaatttttttccagctggactgccaggtactgttcctggagctttcgctcaatacgggcgccccagcttgtctccataccgccggaaaaaatattatttttgatcagctgctgggtaatggtacttccaccgccggaataatcatcactgactacgccttttacagctctggcaatggaacgaagatcaatgccgtcatgggtccagaaacgggagtcttcaatggcaacaaaggcattgaccagattttcaggaagttcttcgtaagtggctgactcacggttggagccgctggtaacaagagtttctgtcagatttccatctgcatcataaaccgtagtagcaaaacggtccggctggatgttcataatatccacagaaggggcattatcaataatacccttgatcattccgaaaccaactgcagcacctgcaactgccaggaaaaggaacaggataaaaaatgccttgaaaatattaaaaacaagtttggatgtgtactttccggtcttagatgaaagggacttaagccttcgctcagtctcatattgtccgtagttcatatagtctcctttacgcagtgtgtcggcattttgaacagaaaatagccgattaaactcctacgattatacaacaattttcagaaaatgaaaagggggatactaatagccgcttgcaagagtgggataactatattatgatgataccagggacaaaaggtcgtaaatccgatgcaagcttgcttgcaggaggatttttgaacttgggtcccgccaaaaacatgagtaagaagccattttttgaagaaaaatgagcggattacgaatgtttttataaatgtttttataaggagcgtataaagtggcggaaaactgtaagattatatataaggaaggaatgggagaactggtggagaaaaaatcccggttcattgcccagatacggcctgtaaagtcagaagaagaggctttggccttcgtagaagagaccagaaagaaatactgggatgcaaggcataactgttatgcctatattcttaaaggagaaggggcaacgcctacagcaagatgcagcgatgacggagaaccttcccagacagcgggaaaacctatgctggatgtgcttatgggagaaggactgatggacgtgtgtgctgtagtcacccgatattttgggggcacacttcttggcacagggggcctggtaagggcttattccggggcagtaaaagaaggtcttgcaaatgcacagatcctggagaaaaaacagggagtgcgtatggaagtgattaccgattacaatggagtgggaaaaatccagtaccttgcagcccaggaaggcattgacacactggacagccagtatacagataaagtggtatttatctttttagtgccgggagagcaggaagaaagttttaaggccaagctggtggaaagcacaaacggcagggcagtgatccgcacagacggggaagtgtactatggaaagtgcgggggagaactgatattgttataaagtacaaagaaaatacaatgaaaaaatccttgcaatatggagtatggaatgctatactacgaaattgtggctgagacaaaaagattcgtatatataaaaggaagataatcactatgaagacaaaaagagaagatgtaagaaacattgccattatcgcccacgtagaccatggtaaaacaactctggtagaccagctgttaaagcagagcggtgtattccgtgccaaccaggaagttcaggaacgtgtaatggactccaacgatattgagcgtgagagaggtatcaccatcctttccaagaataccgctgtatactacaaagatacaaagatcaatatcatcgacacaccaggacatgcagacttcggcggtgaagtagagcgtgtacttaaaatggtaaacggtgttgtactggtagtggatgcttacgaaggtcctatgcctcagacaaagttcgtgcttcagaaggctctggaattagacctttccgttatcgtctgcatcaacaagatcgaccgtccggaagcaagaccggcagaggttattgatgagactctggaactgatgatggatctggacgcttctgatgagcagttagactgcccatttatctatgcatctgcaagagcaggttttgcaagatatgaattagatgataccaacaatgatatggaacctctgtttgaaaccatcgttaagcatatcccggctccggaaggtgatccggaagctccaacccaggttctgatcagtaccattgactacaatgagttcgtaggacgtatcggtgttggtaagatcgacaacggcagcttaaaggtaaaccaggaatgtgttctggtaaaccatcatgatccggataagttcaaaaagatcaagatcggtaagctgtatgagttcgatggcttaaagagagtagaagtacagaaggcagaaatcggttctatcgtagctatctccggtattgcagatatccacattggagatactatctgctcccctgaaaatccggaagcgatcccattccagaagatctccgagccgactattgctatgtatttcatggtaaatgacagcccgttagccggacaggaaggtaaattcatcacctcccgtcacttaagagacagactgttccgtgagttaaatacagacgtcagccttcgtgtagaggaaactgactctgcagactgcttcaaggtatccggtcgtggtgagctgcatctgtccgttctgatcgagaatatgcgtcgtgagggatatgagttcgcagtaagtaaggcagaagttctttacaaatatgacgagcgcaaccgcagattagagccaatggaattagcttatattgatgttccggaagaatacaccggtgttgttatccagaagctgacctccagaaagggtgctcttcagggtatgagccaggcagctggcggctattccagactggaattctccattccttccagaggcctgatcggctacagaggcgatttcatgaccgatacaaagggtaatggtatcttaaatacaattttcgacggctacgctgagtacaaaggtgatatcgcatatcgtcagaccggttccctgatcgcatttgaggctggtgagtctattacttacggtctgttcaatgcacaggagagaggtactctgttcatcggacctggtgttaaggtatattccggtatggtcatcggacagagcccgaaggctgaagacgttgagatcaatgtctgcaagaccaagaagctgaccaacacacgttcttccagcgctgatgaagcattaaagctgactccgcctaagatcatgagcctggagcagtgcctggacttcatcgatacagatgaacttctggaagtaaccccagagagcctgcgtatccgtaagaagatcctggatccaactcttcgtaagagagcttctttcaagaataagtagaaatatatgcgagccgcctgcgtaagcaggcagtagagcgcgtagcgcggggctcgtgagtaatataatacccaactgagggagtagtggcactgcccgtaagggcagtgtgacaagtcaacatactggtcaaggacctggcttgtcttaaataacgagactcatgtatggcttatttgccatacatgatgtctcgttttttaatatgataatacagggtcaaaaggtctaaaatccgatgcaagcttgcttgcaggaggatttttgaagattgcgtgagtgcgaagcacggagcaatctggtattattgataacaataaaatacaaggagaagaaaaatgaaagacgcgtacaccaaaacccctgaacaggtactttcagacctgcattcagacggaagcggcggcctgacaaaagaacaggcagagcagtctcgcaaaaagtatggttccaacacctttatccgggagagccatgaatccctgcttaaaaagatctgggatgcttccacagagcctatgcttctgatgctgatctttgcggcagtgatcaccttaggagtaaatattgcccgctatatgacaggtggagaatataacttcctggaatgcgccggtattttcgcggcgatcgcattatctgtagtgatcactattgttacagagggaaaaagtgccaaagctttcgaggcattaaaccgcatcaatgaagatacactggtaaaagcattaagagataattctccccagctgatcccgcagaaggacattgtagtaggtgatatccttttagtagaaacgggagataagctggtagcagatgcaagattattagagagcaatgacctcagcaccgatgagtcttctcttacaggagaaagccttcctgcagcaaaagaggcagattacgtctgtccccagtccacacctgtggcagagcgcagaaacatgctgtattccggctgctttgtatcaagcggtacaggaaaagcagtggtaactgcagtaggaaacaacacagagtttggacagatcgcaaaagaattatcctcaattgaaaaagacaccacacctcttcaggaaaaactggaccgtctgggaaaagtgatcacagttttaggcgctacagcagcctttatcgtatttgccatccagatcatcggttttgccatgtcccataccatgaactgggaaacagtgtctgatgcttttatcaccagtattgtcctgatcgtagcagcagttccggaaggtcttcctaccatcgtggctgtatcactggcattaaacattattaaaatgtcccgtgaaaatgctctggtaaagaagatgatcgcctgtgagactgtcggctgtattaatatcatctgttccgataaaacaggaactttaacagaaaataagatgaccgtacagcagatctacgccaaaggagaactgttagagcctgagaagcttacggacgtctgtcttttggaaaacttctgtatcaacagcaatgccaatgtgacgattgaagacggaaaagacagctttatcggaaatcctacggaatgtgctcttttagtagcagccagaaaagcaggctgggattatacaaagaaaagagaagaggcagatattgcccacattttcccattttcttcccagaaaaaggatatgagtacgatcctgcgtacagcagaaggttatatgctttatgtaaagggaaatccggaaaagatcatgaacctgtcggttaatctgtctgatgaagagaagaatgcactggaagaaaagatcacttctttccagagccgcgcaggacgtatccttgcttttgcacataaaaagctggatcagtacaccggggaagaaacacaggaagaactggaaacagacctgatctatgatggtttcgttgttatttccgacccattaagccctgatgtttatggtgccatcggccgctgccgcaaagcaggtattgaagtaaaaatgcttaccggcgacaatattttaactgcaagagctattgcagatgagcttcatatgctggatgcagaccacattgcagtagaggcatctgagatcgaaaacatgtccgatgaagaactggcacaggcacttaaaaagatccaggttattgccagaagtacccctcttgtaaagatgcgtgtggtaaaagcattaaaggcacagggaaatgtagtggcagtaaccggtgacggtatcaatgatgcacctgctatcaagaatgcagacgtaggtattgccatgggtattgcaggtacagaagttaccaaggaagccagcgatatcgttcttctggatgactccttctctaccatcatgaaggcggtgcagtggggccgtgccatctatgaaaactttaagcgctttatccagttccagctgactgtaaacgtatcatctgtagtggttgtagtctgttccattttagcaggctttgaaacaccatttacagctcttgaactgttatggatcaacattatcatggacggcccgccagcactgactttaggactggaacccatccgtgatgatattttaaatcatccgcctacaagaagagatgaaaatattatttccaggtccatgatcagccgtatttttgtaaacggtatttttatctccattgtatttatgctccagcattttattaactttttaggggcagcgccggaacaggagtcaactgtattatttaccctgtttgtggtattccagctgtttaatgcttttaactgccgtgaactggaccgcacaccaatgtataagaacctgcttaataataagctgatgcttggcatattcttactggtcctgatccttcagatcatcattacacaggccggaggcgctgtatttgagacagttcctctgtctgtaggattgtggtgcaagatcttaggtgtatcctgcagcgtgatcgtactggacgagatctggaaattatttgaaaaataaatattgttaggaaatcatatgtaagatccaccgctgtttctcctgtcgttttatgtcggaaaacagaggtggatttttatgcatatccggtctatttcttttcatcttttcataaattatctatgtaggtgtccaaaggtacatggcccccaagataccggattgctacgtgcgttgcactcacgcaatcctaaaaacattcgtaatccgctcatttttcttcaaaaatggcttcttactcatgtttttggcgggtcccaagttgataaatcctcctgcaagcaagcttacgtcggatttcccaccttttgaccctggtatcataaaataaaaatggaaaagaagaggagaagtactatgacagaaaaaatgatcgaaaacaacaaggtaagtgtgatcggagagatcgtatcagatttcacattcagccatgaggtctttggagaaggcttttatatggtagaattatctgtcaaccgtttaagtgaacaggcggatatcattcctttaatggtttctgagcggcttgtggatgtacataaggactataagggctgtaccatggaagccgttggccagttccgttcctataaccgtcacgaaggtactaaaaaccgcctgatgttatcggtatttgtacgtgagatccattttatggatgaatttaccgattacacaaagacgaaccagatcttcttagacggctatatctgcaaggcgccgatctaccgcaaaacacctcttggaagagagatcgcagaccttcttttagctgtaaaccgtccttatggaaaatcagattatatcccttgtatcagctggggccgtaatgcccgttttgcttctggctttgaggttggaacaagggtccgtatctggggaagagtccagagccgggagtatacaaagaagatcacggagacagaatgtgagaagcgtattgcttatgaagtatccatcagcaagctggagtgtgatgaattttaaataaattttcatatttaggcaggaaaatcttctggaaatcgtaagaaatatttgcattattacataaattgtgctagagtggttttgaaaaatgctcacatgagagaacagacatgaggtgcagaatgatgaaagaaaatctgatacaggtgatctgcggacctggaaaaggaaagaccgcaagtgccttaggacgaggtgtgaccgctcttttaaaagggaaaacagtcatcatggtacagtttttaaagggttccatggaaacagaaggtatggagatcgtaaaacgactggaaccggagttcaaattattccgatttgaaaaatcacccatcttttttgaccagctttcagaggaagaaaaggacgaagcaaggatcaatatccgcaatggtttgaatttcgcaaaaaaggtactggttacaggagagtgcgatatcctgatcctggatgagatattggggatcctggatgaaggcattatttcattggaggagttaaaagcgctgatctgtcaggcaagacagtccgaagcagaactgatcatgacaggaaccgtttatcctcaggaattagatgagtacgcagacgagatcaccaaggttcagacacgttatgaacactgtgagggttaaatatttacagttgacatctgcaactgataatgctaatattaagaacataaaacagagtagaggttgcgctgatcaaaagtaaccggccggatgtgacaggcacagaagaaggtctggtgaaagggaaaagcgccgaagaaaagaggaaacctgaaagagtcttttctgggcacagggttaagaactttgtgactgtcatccgggtggatggagagctaccgaaagagcagattcgtgaagatgcgaaaccgttggaagagctgacatttacctcagcccttccttttcttttgatgtgatcaccagatttttccagatcacatcgcgataggaacactctggtggatccggggacgcgtactgcgtgtttccaacaattttactatatttaggaggagaaaagacatggcaatttatgaaggcgccggtgttgcactgatcacaccatttaaggcaaatggagaggttaattacgacaagttagaggagatcgtagaagagcagatcgcaggaggtacagatgccattgttgcctgcggtacaacaggtgaagcatctaccatgacccatgaggagcacttagacgttatcaagtttgtatgtgaagttacaaagaagcgtattcctgtaattgctggtacaggttctaactgcacagagactgctatttatctgtcccaggaagcagagaagaatggtgctgacggtctgttagtagtatctccatattacaataaggcaacccagaagggtctgatcgcacatttttccgcagttgcaaattccgtaaagatcccaatgcttctttacaatatcaccggaagaaccggtgtgaccatccagcctgctaccatcgctcatctttggaaaaatgtagataatatcgttggcgtaaaagaggctaatggtgatttctctgctactgcaactttaatgaacttaacagacggcggtattgacctgtactccggaaatgatgaccagatcgttccgttattatccttaggtggaaagggtgttatctctgtattatcaaatgtagctcctgctcaggcacatgagatctgtgcagcatattttgccggtgatgtaaagcgcagtgcaaagcttcagttagatgcgatcccactgatccatgctttattcagcgaggtaaacccgatccctgttaaggcagctatgaacctgttaggaaaagaaacaggacctttaagaatgcctcttactgagatggaacctgagcatcaggaagttcttaagaaggaattacaggcatacggactgctgtaaggagaaaactattctttagggcagcaggagaaaggaaagaaaaatggtcagagtcatcatgcatggctgcaacggcgttatgggccaggtcatcaccggaatggcaaaggatatggaaggtcttaccattgttgcaggcattgatcttaaaaatgataaagaaaatggatatccggtctatgcatccttagaggaatgcaaagaagaggcagatgcagtagtagattttgcttctccgaaggcagcagaccatcttatggatttctgtgcagaaaagaagctgggactggtactttgtactaccggactttctgaagagcagatcaaaaaagtaaaagagacagcagaaaaaacagcagtactgcgttctgccaatatgtctttaggcgtaaaccttttattaaaactggtccaggaggcagcgaaagtactggctagttccggttttgatattgagatcgtggaaaaacaccacaatcagaaaaaggatgctccaagcggaactgcccttgcactggctgagtctatgaacgaagctttaggcaatcagtatcactatgtatatgaccgcagcagcgttcatgaaaagagagatccaaaggagatcggcattgcatctgtccgcggcggttctattgtaggagatcatgatgtgatctttgccggaaaagatgaggtcattacctttaatcatacagcatattccaaggctattttcgcaaaaggcgctctggaagcagcaaaatttttagctggaaaagaacctggattatacgacatgagtgacgtagtgcagctgtagattttgtctggaaaaatttaacactataaagcattctctgatgttacatactaatagcaggtaaacgaaaggagaatgttttatgaaaaagatcagaccgtttttatttgtatgcatgtttgtgcttttgtctctttcccttactgcctgtgcaggaagaaaaaatggcaatatgaatgggacggagcagaacagtgctacttcctcggcggcttctgagactggaaatggaacaggagcaggaaccggggaaaatggcatgaatggagataccgcatccggctggggcgaaggagaaaatggcaccatgaccggcggcaccaatggagagatcgagactaccggagaagggctgctcgatgatcttacagatgatctgagccgtggcgcttccgatgcagcaagtgatgtggaaggccggtaatttatgtgatcaatgagtgtgcaaaggcacgcttgtcatatgcgctgcagtgatgactgtcaggagaaagatgaaaattctttttcctggcagttttttgcttttttttacagcctgttttactcttgaaggaacgataaaaattttctataataaaactggagtgcgtgggaaaggactcccatgaaaaaaagaaaagcagtgaaacaattaaagaaaatgcgaaaggcaggggtgagagcctggaaaaagaagaaaaagaaaggtaaaatgttagctttctttttatttctgacgccttttctgttttcaacttctgccacagggcaggagaactggcaggggctttctgtgccatggccgggaaaagagaagatcctggaatacctgatccaaaaagaagtagtccgggaacaatatgtattggaaaaatctggaaaagaacaggatgatgatacagcaaatcaggttttaaaagaaggcgctgctgtttatctgaaagaaggaaaagtgttatttttcaagatccgggaggagaaaaaacagactgattagaacagagggaatttattcattaggaattttaatgagcctgttgcttgtattcacagaaaacgtgtattataatttctactgaaaatgacttcttttatcgttatgacttataaatgacaagactgtgataaaaggcgaaagcggaaaggaaagaccaatgaaccagaaacagatggactttgatatcagaggagatgaagtgcgggaggaatgtggtgttttcggcatttatgattttgacggaaatgatgttgcctccacaatttattatggcctgtttgctcttcagcacagaggacaggaaagctgcggtattgcagtcagtgatacagaaggcccaaaaggaaaagtaagtgcgtataagggaatgggtctttgcaacgaagtatttacaccggatgtgatcgaaccacttcatggaaatatcggtgtaggccatgtaagatattcaacagcaggaagcagtaccagagagaatgcgcagcctctggtattaaactatgtaaaaggaaccctggcgttagctcacaacggaaacctggtcaatgcaccggagctgcgtcatgaattagaatacacaggcgctattttccagactaccattgactctgaggtcattgcgtatcacattgcaagggcgcgtatccatacaccaaccgtagagctggcagtggcagaagctatgaaaaagatcaagggagcatattccctggtgatcatgagcccaagaaagctgatcggagccagagatccatttggatttaagcctctctgcatcggaaagagagataatgcctatattctggcatctgagacctgtgctttagagactatcggtgcagaatttatccgtgacgtagagccaggtgagatcgttaccattacaaaggacggcattgcttctaataaagaactttgctttacagatcatgcaaaagaagcaagatgtatttttgaatatatttattttgcaagaccggacagtgtatttgacggtgtaagcgtatatcattcccgtattcaggcaggccgttttctggcaatggactcaccggtagatgcagatctggtagtgggcgttccggagtccggaaatgcagcagcccttggctatgcaatggagtcaggtattccttatggaactgcttttgtaaagaattcctatgtaggaagaacttttatcaagccaaaacagagtagccgtgaatcagcggtccgcattaaattaaatgtattaaaagaagctgtggcaggaaaacgtgtgatcatgatcgatgactctattgtccgtggaactaccagtgccctgatcgtaggcatgttaagagacgcaggagccaaagaagtccatgtgcgcatcagtgcgccgccattccttcatccatgttacttcggaaccgatatcccgtcagaagaccagctgatcgctcataaccgtacagtagaagagatccgtgaacttttaggggcagacagcttatcctatctggctttggaccgtctgtatgaaatggcaggaggaaaggcgatctgtactgcatgtttcagcggggattatccgatcgagccgccaaaagaagatatccgcggcagctatgagaagtagatggttgtttagaaaacgcagatatgttatactgtaacgagtgcaggggaaaacaagcggctgcgaagcagacatttgtttttcacaaaccgttaacgaatgaaccgtctgcggagcagacagtagagcgcgttagcgcggggttcatgagtaaaaaaagcctactaagcaggcacaggaggaaaaaccaatgagtaatgataaatacgtaagccctctttctgagcgttatgcaagcaaagagatgcagtacattttttcaccggatatgaaattcaagacctggagaaaactctggatcgcgctggccgagacagagaaagaactgggattaaatattacacaggagcagatcgacgagctgaaagcccatgcagatgacatcaattatgatgttgcaaaggcaagagaaaaagaagtacgtcacgatgttatgagccatgtgtacgcatacggcgtacagtgcccgaaggcaaaaggcattatccatttaggcgctacctcctgttatgtaggagacaatacagatctgatcattatgactgaggctctgcagttagtccgcaagaaattattaaacgtactggctgaactggctaaatttgcagataagtacaaaaatcagccaacactggcatttacccatttccagcctgcacagcctacaactgtaggtaagagagcaaccttatggatgatggaattaaagctggatctggacgatctggaatatctcatcggttccatgcgtctgttaggttctaagggaaccacaggaacccaggcaagtttcttggagctgtttgacggagatcatgaaaaatgccgtcgtttagatcagcggatcgcagagaaaatgggattttccggctgctatcctgtatccggacagacctattccagaaagatcgacagccgtgtgctcagcgttttagcaggtatcgcacagagtgctcacaagttctccaatgatatccgccttctgcagcacttaaaagaagtagaagagccatttgaaaagcaccagatcggttcttccgctatggcatacaagagaaacccgatgcgcagcgagcgcattgcttccctgtccaactacgtaatgagcgatatgatgaatccaatgttagttgcttctacccagtggtttgagcgtactctggatgactctgcaaataagagactgtccgtaccggaaggatttttagctattgatggtatcctggatctgtacttaaacgtagtagacggactggtagtatatccaaaggtaattgagaagcacatgatggcagagcttccatttatggcaacagaaaacattatgatggatgctgtaaaggcaggtggagaccgtcaggaacttcatgagcgtatccgtcagctttccatggaagcaggcagaaacgtaaaagaaaagggtgaggacaacaatctgttagagctgatcgcagcagatcctgcattcaacctgtccttagaggatttaaagaaggctatggagccatcccgctatgtaggacgcgcaccaaagcaggtagaagagttcttagaggaagtcatcaacccgatcttaaaggaaaacgaagaagttctgggaatgactgctcagatcaatgtataaaagatcataaatttgaaataaatggacgaagggggctggagcgaaagcattcagcccccttttaataagcacagggatcctgcgctttatgcaaggggaattttatgaatatcaatctggaatactacaaggtattttattatgtatgtcaggaaggcagccttacggcagcggcccagagactttgcatttcccagccggcagtaagccaggcagtgcgtcagctggaaaaagaggcgggaacaaaattattttcccgtacttccaaaggggtgctccttacaagagaaggagaactgttataccattatgtaaaaggcggggtagaacagctgctagaaggcggacggatgcttaaaagaatgctggatatggatatgggagaggtgcggatcggtgccagtgacatgacactgcagttctttttacttccttatctggagcagttccacaaagaatatccgaagatcaaggtgacagtgaccaatgcgccgactccggagaccatccgctgcctggaagagggcaagatcgacttcggtgtggtaacaacgccattttcaggtcatggagctatccacagtacagaggtaaagccgattgataatgtatttattgcaggaagcagctttaaagaattgcaggggaaagagctggactattccattctctgtgatcttccctgtatcttccttgaaaaaaataccagcacccgcctgtttatggatcagtttttatcccagaaaggcattgaattaaagccggaatttgagctggctaccagtgatatgatcgtacagtttgccaggcggaacatgggcgttggctgcgtgatggaaggctttgcagaagaagcaatagagcggggagaagtatttgccctttcctttaaggaaaaaatgccgtcccgttccatctgtctggtaacaggagagtcggggttaatgtccatggcgggaaagcacctgttggaactgcttacagggaaataagaaaaatagatagcggatacagataacataagctgatattatgacattcataataaataatcactttacttatagcctataatatagtaaagtaaaagaagattgattatttattatgatactgggcttatgccccaaggaggaatttacgtatggttagagcaattgtaggtgctaactggggagacgaaggaaaaggcaagatcacagatatgcttgcaaaagagtctgacattatcatccgtttccagggcggaagtaatgcaggtcataccattatcaatgattatggtaaatttgcgcttcatcttcttccatctggtgtattctatcagcacactaccagcatcattggaaatggcgttgcattaaacatcccatatctgatcaaggagatccagtctatcgtagacagaggcgttccgaagccacacatcctggtttctgacagagcacagatcctgatgccttaccatgtactgtttgatacttatgaggaggctcgtctggctggtaagtcctttggctccaccaagtccggaattgctccattctattctgataaatatgcaaagatcggcttccaggtaagcgaactctttgatgatgatctgttaaaggaaaagacagagagagtatgcgagatcaagaacgtacttcttgagcatctgtaccacaaacctctgttagatccaaaggaactgtacgatgagttagtaacctaccgtgaaatgatccgtccatatgtatgtgacgtatctgcatatctgcacaatgccattaaagaaggcaagaagatcctgttagagggacagttaggttccttaaaggatccggatcacggaatttacccaatggtaacttcttcctctacactggctgcttacggtgctatcggcgcaggtatcccaccatatgagatcaaggatattactactgttgttaaggcatactccagcgcagttggcgcaggcgcatttgtcagcgagatcttcggtgatgaagcagaagagttaagaaaccgtggcggtgacggcggcgagtacggcgctactaccggacgtccaagaagagtaggctggttcgatgcagttgctaccagatacggctgccgtatccagggcgctactgaagtggccttcacagtattagatgtacttggctacttagatgagatcccggtttgcattggctatgagatcgacggcgaagtgaccagagacttcccaactactgcaaagcttgaaaaggctaaaccggtatttaccaagcttccaggctggaagacagatatccgcggaatcaagaactacgcagatcttccagagaactgccgtaagtatattgagtttgtagaaaaagagattgaagtaccgatcacaatggtatctaatggcccaggccgtgatgatattatccttaaataaatgaacggaaaaaacaggcgtatccgaaagatcaggatgcgcctgttttttaataacattctataactcccccagctttgccaggctgcgccactccttaggtgtgacgccggtacactttttaaaaatagagatgaaatagcttacatcgttgtagcctgctttggcagcaatatcattgatccgcatatccgtaagccgtaaaagctccatggatttttttaaacgcaggtctaaaagcagttcgctgaaggactgtcctgtattctttttgatgaggcgggacagataagcggcgctgtagttcatagactgggccagcatatcaagagaaacattctgctccagattctgttccagataatcagtaatgcgttctgcaatcccgtctccaaaagaactggatcctgtctggatcagagactctaacagggaaagagattctttggacagtgtttccatactttcacagcggaataaatgttcgatagcatcttattcattttcagaactgttaatataactttcggcaaaacggtatgtaagcacaacaagattgatcagcgtttttttaatataagaaaagtcaccgtgggcagactggagcagttcatcaaaaaactgccggaaggtctgttgtaattcttgtttctgattctgaacaatacatttctgtattttcttttcatacatggtcagattgaaaatatcatgatcctgttttttctgtatttccgaatacatgatcagggaatttccacctaaagcgctccggcagttaagggcctggacagattgcttttttaactgatgaagcataaaaatatcagaacttggaaggctgatgccaaaagaaatatggaaccccagttcctgcagcgttgtcttctggagcatttcgcacaggtgtaaagaggcaacctcacaaaattcaggggaatgctttgcattaaaacaaaggatacagctgataatatcaataccctgggcaagataaacttccggttccattccatttaacagctctttgatctgggcatagagggcaatatctaaggaacttccgggaaagtcactttgggtggaaatgaccacataaagagcatccttaatgttgcaggcagctattttttctgaataatccccaatacgtccctctaatagatcctggtagatctgctctgtgagaagaggagagatgagctgaagcttttcctggatgtatgtctgctgtctgcgcctgctttccaggttatctaaggaatggatacaggaaaggagggcggattcaatatcttcaaatcggaatggctttaaaaggtactggcggattccaagtgataaagcctgtttggcgtattcaaattctgcatagccggttaaaagtatgatctctgtttccggggatcgttcttttacagctttggaaagctccaggccgttcatccccggcatacgtatatcgctgatcaaaatatccactttttctgattccagagtatgcagtgcatttaagccgttttctgcaaagcaggtcacacaacactggtgatcagaccatggaaatgtttttaaactgtcaagtacgataggttcatcgtctgcgatcattatcttatacatacatatttcctcaaattctttactgcttttctttttctgccttctcaacatgaagaggcatgcggatgataatagtggttccttttcctggatcagacaggatctttaagccaaaatccgttccatacagaagctggagccgtttgtggacactggaaagtccaaaactgcctttcgtgcctggaggcggatctaaggccttttctatctgggcccgtgtcattcccacaccattatcatggatcataaagaggacggtttcttcctcatcatttaagatcccgcttatttttatagtaccgtttccatttttttcttccagaccatggataaaggcattttccacaataggctgaagaataagtttggggatcataacaggcataagtgccggttctacagcaatatttgcctgtattttatccctgaagcgggctttctgtatctgtatataatcacggatataagacagttcctgggaaacagttatataaggatcagtgtttcccatagatgcacgcaggagagaggccagagaataggtagtatcaaaaatagcatcgttgcctgcaagttttgcctgccagcagatggtatctaaggtattataaagaaaatgtggattcgtctgtgcctgcagggaagcatattctgcttccttgcgcaaaagctctgccttgtatacagtctggatcagggaattgatcttctggatcatgtgattaaaaccggtatttaagtcgttaaattcattttttgaaatgccttctgccagattaacggagaaatcgccttctgaggcttttttcatggcagctgttactgtatggattttttcagcaaaagagcgtgaaagcctgtaggaaataaatattgccacagcagatactaaaagtacgcctgtaataacagaaagagccagttttcgtacctgggcatgcaggtcagaaactgaaatgatccccagggatttccagccggtcttaggagaagtagtataaaaatactcataatccacagagccgatcttacggttaaaacatccatttgtgccggtaagaaaaggatcaagatctgtaaggaaagaaggatccacttctttgatattaataggctggtttttggaatctaagataagggcaaatcctttctcatcaaaatggatattctttaccagattgtcaatatagctgctgtaaagcgaaatatataagatacccatatgatgaaaatttctggtactttcaataggacgtatcatctggatgatctgttgcctggtatcaccgcgccaggtaatgtcgtatatatcagtcaggtcagaagccgggtaaaacagatcctctgtatccggatccagcctggcaggtacacgaaaaagagtattattgtctttgatcgaagcagcgggacggatggtaatatcccgcatggatgcatagtcatatgtaaggatcatattcttttccagctgatagctgtccacccggctgatagactgtccgtttgacagattttccagtgcattctggatatagttattataagaaatggaaagagaggtattttcaatctgtactaataactgatccaggttgtcagacaactgctggatggattctgctgcataggaactggatttctggttgatgatccgggaagctaacagataacaccaggaggagatcacagaaagcgggatcacagtaaaaataagaaaccagattaaaagctgttcctggattttgcggtttttcattttatgccctcctgtcatagtcatagaaaatttccaatttaagaatagcacaaacaagaaaaaaagtatgcaggtttttcataacgtgtcatattacccatattatatcagattctttatattgtttttaaatccatggatatgataccataaagtcatcagaaatgaagcaaataaaagaaaaaatgaagtaaaaagcaaaaacgaaaggaaaacaggaaggagaagaagttatgaaaaaaaggaattgggtgatcatgatgtcagcagcggctcttgctatggcaagcgtgaccggatgctcttcacagaatgggggagaaacaactgccaaggtggaaaatgcaggtggaagtaaagatggggcttctgctgatggggtaaaggagatcactatgtggtatcaggaaaataagaccatgatacctgcttttgaccagagagtagaagattttaacaagaaatatgaagggaaatatcatctgaccattgagtatattccaagaggttcttcttatgcttatgaggataaggtaaactcagcagctgcagcaggaattcttccggatcttctttctttagacggtcctaatgtttctaactatgcagcaaatggaattattgttccgatcaccagttacgtgtccgaggacagcaaaaacgacatgcttccatctacagtattacagaatacatacaagaatgacatgtatgcagtcagctttaatgaagcagtcagtctgttctattacaacaaagatgtatttgaggaacatggcttccgtattccggaaggaattgatgatgcttacacactggatgaagtgtatgaaatggcaaaagaagtttccactcctgaaatggtaggtattaagattatcatggataagggtgaaggaatgatttacggtttatctccattatttgattcagcaggtgcaccgttagtcagtgaagatggttcaaaggcagatggctacatcaacagtgaaaagagtgtagagaccgctgcaaagcttcagaaattctttgatgaaaaacttgcaaatattgatcctactcctactgagttccaggatcagaaggcagctatgtggatcgcaggcaatacgaaccaaatggttcagtttgagcagttcccggatctgcattggggagcaacttatctgccaaaaacaggcgatcatgtagtttccaactgtggaagctggacactgggaatttctaaagactgcaaggatccggatgcagcttatgtggcactggaattcatgactaattctgaatctaccagactttacggtgaggtaggaggatatccgcctgcaagaaagtctgcttatgaaaataatacccagtgggatgaatatccatatagtcttgcaaaagaacagctttttgaggcggctgttccaagaccaaagacaccagtttacactgtattgacttccaagtttgcagaggcaatgttagacatttttaccggttctgacgcaaaggaatctctggatgcagtggcatcttatgtagatgatgaatatgcaagagtgcaggattctatgaaatagcaagtatgaaatagcagtaaatgggatgccttctaacaaagaagacatcccattctggtaaagagcatttgtaaaggaggagtattgtgagatataagatcgattccggaaacagtaccagaattaatattacaggaagaagaacaggggagcggccgggctgtgttcgtatcttccacaagggacagctgtcagaggaagcatattacaaattttccggttttgaaacttttttatttatctgggaaaaagagcaggaatatgaggtggagatctgtgaactggaggtttctttagcctattcttactgcccggactgtgtgctggagcagggagtaagatttatagaatttaaagataaggcgtatttttatacaaaagataatttaaaagatgcgctgacgcaggattacagaaatactttccatttttctccttataaaaactggatgaatgatccaaacggtctttgctggtttaagggatattatcacctgttttatcagtacaaccctaatggtcaggaatggggaaatatgcactggggtcatgcagtgagtaaagatcttcttcactgggtacatcagccggttgcagcttatccgcagatcgagttaaatggctgtgaaggagaatacaggggcggagctttttctggaagtgcagtgatcgaaaaagatgtgatgcatttattttacaccaggcatttcggaaaaacagaccgcagctggcaaagacagtggcaggtaacaaaacaaagcaaggacggcgttcattttactcatgaagaatgtgctgtgtggggaacaccagaaggtgttacctggcatttcagggatcctaaggttgttcagatagaggataagtggaatatgatcattgcaggtagctgttatgaccgtccagcagtattccgttatgaatcagatgatcttaaaagctggaaatatgccgggatcttatatggggaaacagatccccagtacggtattgcagagtgtccggatttcttttatttagatggaacatgggttttgatcgtcagttatatttatgcagacgggcgtaaggatggacgagatgtagtatggtatacaggaacttataaagatggaaaatttgatccggaaaacaagggcctattagatgaaggaaaagattattatgctccgcaaagctttgaagtggaaggagagcgtataagtgccggatggaactgtcacaggctggggcagcatatagcacagccgggaagtgccaacggtagcttaagtcttccgagaaaattagcagtaaaaaatggaaaactatactcacaggtaatcccacagatccaggaactttttacagaaaaagcagaaaacgggccgtatttcctttcaatgagaaagacaaaagaaataaaggaaagtacagttctttctctggctggatcactggcaggaaaggtaaatctgtatattggtgaaactgctttaaaactaactcttgaaaaagaagatgcagatgcaaaagagcaggcacttccatttgtatgccagatacagacagatcatccggtagaagaaataactgcatatgtagataaagcgatcatagagctgtttatcaatggcggcgaacaggcatgtacaagaagattttatcttccaaaagcagttttaagacctgtagcagaaaagacaggtgcatggagtattgatataaagggaatgagatccatctggtgattccatccggtaaaagaagggagatattataatgaggggcagaagaaaaagctatgcttactttttcatccttccaggctgtctgatcctgctgatgtttaccatcctggcagcggctctggcatttggatttagttttatggattttaacctgctgcggccaaaggatgcagcctttgtaggatttgaaaattacatccgcctgtttcaggatgccagttttttaaaggcaatgaaaaatacactgtattttgcagttattgtagttccttatcaggttacactggcatttggtctggcacttttagtacgtgaaaatattaaaggcattgggattttccggtctgcctatttttcaccgttagtaacatctatgagtgttatcgctatcctgtggacctttatttacaatcccaatccaacacagggtcttttaaatgctattttaacaaaattcgggcttccggcctgcgatttcctgcgaagtgctgatacagccatgaactccattatctttatgtcaggctggcatgcagcaggacatcagatgatgatccttttggcaggtcttcaggcaatcccggaagatctttatgaagcagcttccattgacggggccggtgcattaaaaaagtttctttatatcacaattccaggtattaaaaatgtgctgatcttcgtagttatgatgacgacgatcgctgccatgaagctgtttacacagccttacatcatgactaacggcggtccaaaagagtctactatgacactgacctattatctgtatcgccagggcttccagtaccgtaatatgggatatgcttctgcagtttcagttattttctttattgtagtagtaggtatttcagttgtagtaaagaagcttatgaaagcaagataggaggataaacagatgaataagaataaaaaatattttctgatctatgtagtcaatatccttctgggacttttgtatatttctcccctgatctggatggtggtatctgcatttaaaccggaaaaccgtatttttgcagatatgtccaaaggactggcagccttctggcctgcaggagcgaccttagataattttaaagaagtctttgtacgaagcaacatgccccgctatatcctgaacagtgttacttatgttacgatccttgtgtttttaagcatggcagtaaactctgcctttggttatgcacttgcaaaatttgaatttaagggtaaaaatgtgatccttacagtggtattatctttgctggtactgccgttggaaagtattttgctatctttgtttttcattgtaaataagctgggatgggtggattcctatctggcactgatcattccttttattgtaaaatgttttgacgtatacctgttcaggcagtttttcctggatgtgccggatgatctgatcgaagcagcagagattgacggagccggaccatttaaaacctttttacaggtcatcataccggtatccaagcctgtttttgctactgtctttattctggattatgtggcttactggtccgactttatgtggccgctgcttgttatcactgatgcaggaaaaagaacggtacagcttggtatccagacattctttacagaacctccggtttattatggtcctatcatggctgcactgactattgcatctgtgcctatgatcattatgttcctgtttttacagaaatattatgtacagggaatttctaccagtggtattaaaggttgatattatcaaaaaagttaaaaaatataaaaaaggtctgctgatgatattctatcaaaagcagaccttttgcattaaaaattataaataaattcaggatctggtacactgtttcataaataactggccggcattgcagacaatgggatggttggttatttttttaatgatgtatcattactgtcatctttttttaacacccgtgtcatcagtcccatagcataaaacagtacggaaataaacacgatagagaaaataactgccatcagctgattggccggggcaccggttattgcaagtacaatggctgcaacaaaaaggcctgctaataatattaccataagggcagctgatatccgttttaatttcttcatggatttttataactcctttttattctgccagttcttcccatttctcatagagaacttccagttctttctggatggactctttctctttgttcagttccataaggcgggaaacatcggtatatacatcttcctgggagaggagctcatcgatctcgccatcccttgtttcaagctcatggatcttatcctcaatttttttaagttcattctggcgtttgcgaagacgggcctgttcttctttctgggctttccagtctatttttccgtcagcaggagaaccggcagaggaggcggtcatagctgtctgggaagtacggtttgaagatatgccggaggcagtactggctgcctgcgggctgtttgtaccggttggatggttagctgcagtctgggccatctgcctagcggcaaatgcagcttctacatcctctttcttttccagatagtagtcataattgccgatatagttgataaatgaaccatccgtcagatccaggatacgggtagcagtacggttgatgaaataacggtcatgggatacgtacaataccgttcctgtatagcggtttaatgcgctttccaggatctccttggaagtaatatccagatggttggtaggctcgtcaagaagcaggaaattggcatcagagagcattaatttcgcaagggaaacacggcctctttcaccgccgcttaagtcacggatcagcttaaatacgtcatctcctgtaaacaggaaagcagccagtgtattgcggatctgggtgttgttcatgtttggataggtatcctggatctcctggaacagggttttatccatatgcagtacctgatgctcctgatcatagtagccgatatgcaccttggaacctaaacggatctgaccggaatcagcagggataatgccattgatgatctttaaaagagtggtctttccggtaccattatttccaatgatagcaacacgttccccccgcttgatctcaaagtccacattggtaaataaggtctgtgtgtcaaaggatttgcttaaatctgtaacggtcagaacatcatttccgctgaccacatccggctctaagcggatatccatagaatcatttgcctgggtaggcttttctaaccgctcgatcttatccagcattttttcacggctttctgcacgtttaatggatttttcacggttgaaagattttaacttggcgataacagcctcctgatggcggatctcctgctgctggtttaaataggcacggatggcagcatcgcgtagcatggcctttttatcgctgtaggcagaataattgcctgaaaatacagtacaatgccccatgtccagctcaatgatctttgttaccacacggtccaggaaataccggtcatgggcaacgatgatcacagcaccgctgtagtttctcagataagtttctaaccatgcgatggactccatatccaggtggttggtcggctcgtcaaggagcaggatgtccggtttggtaaggagcagtttgcctaaggaaacacgggtcttctggccgccggaaagagcagtgatgggtttggaaaactcatcctctgtaaatccaagtccctttaaaacgccggtgatctcgctctgataggaatagccgtctgccatttcaaattcatggtttaaacggctgtattcagaaagcttggtctctaattcatcaccggaagcggatttcatttccagttccaggctgcgaatgcgggcctccatctggatcaccggctttttcacctctaaaagtgcatcgtaaatagtctcggctccctctaagtcctggtgctgtgccagataaccgatggaagcacctttcgcccaggtaacaacgccatcatcagcgttcagttttccgataagcacttttaaaagagtggacttgccggcaccattaatgcctacaatggccgccttttcgtggtcttctatatggaaggaaacctgctttaaaatgtcattttccccaaatgacttgcagatattgctgcaggataatatcatgataaactccttaaaaacgtagtaaaaatgtagtaaaattaagtattttcccgacaaaatgagccggttcgcaccaaacagtataatataggaaaataattttttcaagaacatactgaaaaacagatttgacatttatttaacgtctgattataatggatactagagttatcataccccgataatgcaagggggtgaatcatgaacaagaaggagagggttaaaatggaacgcaaagagatatcaaaagcagtaatttcaagactgcccagatattatcgctaccttggcgagctgatcgaggaaggagtagagcgtatttcttctaatgaactgagcagcagaatgaaggtaacggcgtctcagatccgtcaggaccttaacaattttggtggctttggccagcagggctacggatataacgtaaaatatctttattcagagatcgcaaagatccttggaattgaccgtcagcacaatgtgatcatcattggtgcaggtaatctgggacaggccattgccaattatacgaattttgagcggagaggatttgttatcagaggaatgtttgatatcaatccaaagctgatcggactggtgatccgcggcattgagatccgttctgtggatgatctggaaacctttatcagggaaaataatatccagatcgcagcacttaccattccaaagacaaaggctccggagattgctgaccgattgatcaaagccggcatcaaggcaatctggaactttgcccacacagatctggtagtgccggatgatgtagtagtagaaaatgtacacttatcagagagtctgatgcgtctgtcttaccgtgtgtgcaacatgcaggaaaagtctgatgcagaggatacaaaaaaagaataaaaagagagtaaacgtgatgatactgggagtaggaacggatctggtggaaattgaccgtatgaggaaggcctgcgaaaaagaacattttgtgtcacgcacatttacagaggcggaaagccggcaagcaggagggtctgcctctaagcttgccggctcttttgctgtaaaagaggcggtagccaaggtgtttggcacaggttttcgcacctttatgccgggagatattgaggttttgcgggatgaactgggaaaaccctatgtacgtctttatggtggagctttagaacagtttgaaaaaatgggaatggagcagatccatgtttctatttccaatacaaatggactggcaatggcttttgcagtaggagaaggaagaggagagcagaaaaaatgaggactcttttattaggaagaaaaatgaaagcaacggatgccaaaaccattcaggagatcggtattccgtctatggtattaatggaacgggcggctatggcagtggctgcagaggcagaaaaggcagcaaaaaaagatgagatcgtctgggctgtgtgcggcagtggcaataacggagcagacggtattgcagcggccagaatgctccatttaaaaggctatcccgtatgcatttatatggcaggggatgaaaacagaggaacagtggaattaaaaacacagctttccattgcccgaaaactgggaatttctgtaaaaccatggcaggagatcgagacagaaaagaaaggaaaacactgttgcgttatcattgatgcagtattcggagtaggtcttggccgtccggtagaaggaaattataaaagatgtttagatgacctgaaccagataagagaacaggagcatactttctgtgtggcagtagacattccttccggtatccacgcagatacaggcgctgttatgggaactgctttaaaagcagatgtgactgtgacttttggctgggaaaaaatgggaactgccctttacccgggaagaagttatgcaggaaaagtgctggtaaaagatatcggctttcctgaaatggcattagaaggggaagaggaagaaggcggcagaccggaacgggcttttgcctatgaaaagaaagatctttgccacattcctgaaagaaaagcagactccaacaaaggaacttttggaaaagtgctgatcgcagcgggaagtgcaggtatgtgtggtgctgcctatttaagtgcccttactgcctacagagcaggagccggactggtaaagatcctcacagtagaagaaaaccgtcccatccttcagggactccttccggaggcgatcattgcatcctatactccggatcagcttcttcagggaagagaagaatttaaagaaatgatcgaggaacagatgaaatgggcaagtgtagtggttttaggaccgggacttggaagtgagccttatgtagaatatctggtagaggatatacttaccagtgcctatgttccggtgatcctggatgcagatgggttaaataccattgcatcccatccttatcttacttcttattatacagaaaatattatcattaccccacatcttggtgaaatggcaagacttacaggacagaccatcagccagctaaaagaagatctggtgggagcagccagtgcttatgcatcccggtatggagttacctgcgtattaaaggatgcagctacggtagttgcaggccaggaaggcggcctttatattaataccagcggctgcagtgccatggcaaaagccggttccggggatgtgcttaccggtacgatcgcgggacttttagcaattggcatggaagaggaagaagcagcccgcatgggtgtgtatgttcacggtctggcaggagagaaagcagccggggcaggaagccacagtctgctggccacagaattatcccaggcagtaggggatgttatggacgaggcagtgagacgcaatgggtaaaccgtaccagttgcagcagaataaatatgttggcaaaaactgattgaatgactgggaaaccttcttgaaaaatgcggcgtatggtgtataattaaagcttagcgcactttagtgcgttttcagaaagagatcgtttaggaaggcatgaatacgccgggaggaaataaaacatatatgagaccttacagcagagtatatgcaacagtaaacctggatgctgttgcttctaatatgagatccatgcgggacaatctgcctgcatctaccctgatcatgggatcggtgaaagcagatggctatggacatggaagcgttcctgtggcaaaaaccattgaaccttatgtgtttggatatgcagtagctactattgatgagggcatcatccttcgcagacatgggatcaataagaccatccttattctgggtgtgacccatgagtcacgctatgaggatctgctgcgctacgatatccgcactgccatgttccagtatgaaaaagcaaaaaaactgtcagacctggcattaaaacagggcaaaaaggcagtggtgcatctggcactggacacaggtatgagccggatcggtatgaaagcagacagagaacatgcaaaagaggcagcagccattgcagccttagagggcattgaagtagaaggtctgtttacccattttgcaagagcagatgagacagataaatccgcttatgaagagcagtaccgccgttataaagaatttttaggctaccttaaggaactgggggtaaagatcccgatccgccactgctccaacagtgccggtatcgttgagtcattagagtccaatcatatggatatggtaagggccggtattgccatttatggcatgtatccttctgatgaggtagatcataacagcgtaaaactgacaccagctatggagatcaaaagctgcattacctacatcaaggagattgaagccggtacagcagtcagctatggcggcacctttgtggcagaccataccatgaaagtagcaaccattcctgtaggttatggagatggttatgtccgttccctttccggaaaaggagatgtgctgatccacggcaagagagcagctattttaggccgtatctgcatggatcagtttatggtagatgtaacagatatcccggatgtacaggaagatgatgaagttacccttttaggcagtgacggggctgaatgcattacgatggaagaactggcagaaaagtccggcggtttccattatgaaatgatctgcgatatcggaaaacgtataccgagagtttacttaaaagacggaaaagtagtgggtaccaaagattattttgatgatgtatttaagggatttgagtaattttcagtaggttacaataagttttttaatattaaattcgtgatatacgggtaaacaagctccggaaagcatttctcctcatatgataacagtagtgtatacattttaaaaatgtgtcaatactaagggtaagaatatgacggagagtgaaggctgtgatcatcagacgcggagatatttattacgcagatctaagacctgttgtagggtctgaacagggcggtgtgcggccggtccttatcatccagaatgatgtgggaaaccggcacagtccgacagtgatctgcgcagcgatcacatcaaggatgaacaaggcgaagctgcctacccatgtagaattaaacaggggaagctgtgacatgatacgggattccgtgatccttttagagcaggtcaggaccattgacaagcagaggttaaaggagaagatctgtcacattgacggagaactgttacagaaggtaaatgaggcattaatgataagtctggaactgcatacataggctgtgagtggtacagtcctgcttttccaggctgttcttatgtaaagacaacaacagataatggagataaaaatgggaggaatattaaaaagtacctgggaaatgcttcatgacgggcgcttcttaaaaaaggcacttatgatcgcatgcccggtggcactacagggaatgttaaataccattgtaaatatggtagatacccttatgatcggaggactgggatcaacagcgatcgcagccgttggacttgcaaataaggtgtttttcgtgttttcactgctggtttttggaattgtcagcggcggtggtattttagcagcccagttctggggcagcggtgatgtgaaaaatatcaggaaggttttaggactttgtgtgatgcttgctatggtgggagccatgttttttgtggtcccggcccttacggctcccagaatggtcatgaggatctttaccaccagtgagggaagcattgaactgggggcaaagtatcttcggatcgcagctttaagctatccgtttattgcgcttaccaatgtatatgtggcaatgcttcgcgctaccaataaagtagtatttccggtgatctgcagctgtattgccattgttgttaatatctgcttaaactatgtgcttatttttggaaagtttggcgcaccgaccatgggcgtagccggtgctgcctgcgctacacttactgccagatgcattgaggtgactctggtacttttctatgtatatgggaagaaactgcctcttgcctgcggaccgaagggaatgtttggctggcataaggcgtttatcactcagtttttggaaacatccgccccggtcattgcaaatgaatttatgtggggactgggcactaccatgtattccctggcgtatggacgtatgagcgatgacgcagtggcagctattactattgcaaccaccattcaggacattgcggtggtattattccagggcttaagcgcagccacagcagttatcctgggaaatgaacttggtgctggtaagttaaaacgtgcagaaaaatatgctacccagttttttatcctgcagtttattgttactataacagcaggggtgtgtctgatacttggaaggtggaagatcatcggtatttacagcattacaccggaagtagccatggatgtaagccggtgtctgctggtatttgttgcttatatgcctgcaaagatgtttaactatgtaaatatcgtaggtgtactgcgaagcggtggtgataccaggatgtgcctgttcctggataccagcggtgtatggtgcattggagttccgctggcgtttttaggcgcattagtatggcatctgcctatttacggggtctatgcccttgttatgtcagaagaagtttataagctgatcctgggctatatacgctaccgtcagaaaaaatggcttaaaaatctggcgatccaggtctgattttatcttgtcagataaaaaaaatcgtgttagtatagaaaagatgtaatatcagagatgatattgtaaaatttcgtaaacgaaagaaacaagaaataaagaaagggtgttataccaatgtcaggacattcaaaatttgctaatatcaaacacaaaaaggagcgtaacgatgctgctaaaggtaagatctttactgtgatcggcagagagttagcagtagctgtaaaagagggcggaccagatccggcaaacaacagcaagcttcgtgatgttattgcaaaggcaaaagcaaacaacatgccaaacgataccattgaccgtggaatcaagaaggcagcaggcgatgcagcttccgtaaactacgaaacacttacatacgaaggctacggcccaagtggtgttgctattatcgtagatactctgacagacaacaagaaccgtactgcagcaaatgtcagaagcgcatttacaaagggcggcggcaacgtaggaactccaggaagtgtttcctatatgttcgataagaagggtcagatcatcatcgacaaagaagagtgcgagatggatgctgacgaactgatgatggctgcattagatgcgggcgctgaggacttctccgaggaagaagacagctacgaagtaatcactgcaccagatgatttcagtgcagtacgtgaagcattagaagcattaaagatcccgatgatggaagcagatgttaccatgatcccacagacatgggtagagctttccaatgaagatgatattaagaaattaaaccgtatcctggatctgttagatgaggatgatgacgttcaggctgtatatcataactgggatgagtgattaaaaacgttttagcacatataaaactctttcctgccgcaggctttttgcggtgggaaagggttttttgcgcctgtggctgcacttgacaatgactggtttttcctatataatacactgaatgtgtggggtattttaagagatactgaagacatttttcgtgaaacaaaaacagggacatgaaaggtgcagataacgcatagattgcaatgggcagattaaaagatgcccctgaatgcatgttgtaagcaaatagcaaaaggaaggaagcaggaaaaatggcagacaagaaacacattttgacatatgccggactgaagcagtacgaggatgagctgcagaacctgaaggtagtcagaagaaaagaagtagctcagaagatcaaagaggcaagagagcagggagacctttccgagaacgctgagtacgatgcagcaaaagatgagcagagagacatcgagcttcgtattgaagagctggaaaaactgttaaagaacgctgaagttgttgtagaagaagaaatcgacgtaaacaagatcaacatcggctgcaaggtaaaactgttggacgtagaatatgacgaggagatggaattctatatcgtaggttccactgaggcaaacagccttcagaacaagatctccaatgaagctcctgtaggacgcgctctcatcggcaagtctgtaggagatgttgtagacgtagaaacacaggctggaattattcagtacaaggtactggagatccagagagtatcatagttgaatttaaaactttatcacaaaggagcaaaaaaacgtgggagagcagcagaagtcaaatcagacagagcaggatttaaaccatgtactgaaggcacgccgtgacaagctggcagaacttcaggcagctggaaaggaccctttccagatcacaaaatatgatgtaactgcccacagcatggatattaaggaacattatgaagagtgggaaggaaaagaagcaagcattgccggacgtttaatgtttaagcgtgttatgggtaaggcttctttctgcaacattcaggacctgaagggaaatatccaggtttatgtggcaagagacagcatcggtgaagatgcatacaaagattttaagaaaatggatatcggtgatatcgtaggcgtaaagggaaaagcattcaccacaaagaccggtgagatctccgttcacgcagacgaagtgacccttctttccaagagccttcaggttcttccggagaagttccatggtctgactgatacagatatgcgttaccgtcagcgttacgtagacctgatcatgaatgcagaagtaaaggatactttcgtaaaacgttccaagatcttagctgcgatccgtaaatacttaggtggcgaaggcttcatggaagtagagactcctatgctggttgcaaatgcaggcggcgctgctgcaagaccatttgagacccatttcaatgctctgaacgaagatctgaagctgcgtatttcccttgagctttatctgaagcgtctgatcgtaggcggtctggagagagtatacgagatcggccgtgtattccgtaacgaaggtcttgatacaagacataacccggaattcaccctgatggagttataccaggcatatactgattaccacggcatgatggacttaacagaaaatctgtaccgtttcgttgcacaggaagttcttggaactaccaagatcgtttacaatggcattgaaatggatcttggaaagccatttgagcgcattaccatggtagatgctgttaagaagtattccggtgtagatttcaatgagatccacactctggaagaagcaagagccgttgcaaaagaaaagaatattgcatttgaagagcgccacaaaaagggcgatatcttgaacctgttcttcgaggaattcgtagaagaacatctgttacagccaacctttgttatggatcatccggtagagatctctccattaacaaagaagaaaccggaaaatccagactatgtagaacgtttcgagttcttcatgaacggctgggaaatggcaaatgcttactccgagttaaacgacccgatcgatcagagagagcgtttcaaagcacaggaagaactgtttgctgccggtgatgaagaagcaaaccacacagacgaagacttcttaaacgcactggagatcggtatgcctcctacaggcggtatcggtttcggtatcgacagaatgtgcatgctgcttaccaactctgcagctatcagagatgtcctgctcttcccaaccatgaagacacagggcgctgcaaagaatgaagcaaacaatgcagcacaggcagctggtgcagcagaagcaggcgcaactgctggtgacaacaatggtttctttacaccaaacgagaagatcgacttctccaaggtaaaagtagagccattatttgaagagcaggttgactttgaaaccttctccaagtctgattttcgcgctgtaaaggtaaaagcctgcgaagcagtaaagaaatccaaaaagcttcttcagttcactctggatgacggaaccggcacagaccgtaccatcttaagcggtatccatgcttactacgagccagaagaactggtagggaagactctgatcgccatcaccaacctgccaccaagagccatgatgggaattgagtcctgtggtatgctcttaagtgcagtatgtgaagaaaacggcgaagagaagctgaatctgctgatggtagataaccatatcccggcaggtgcaaagctgtactaatcatacaataaagcaatttgtgcaaaacgtgtataaaaaacagggggctgtcgcactaaatgaaaattagtgtggcagcactttttttgaaaaaatttaagagcccggcttcgaaaagtcgggctcttggtgtaaaattaatgtatgaccaaacacattaaattacagaaagattataccgcatcttgcctgtactatcaaattaaacttcctttggatatcgaaaaaacattccatcagatgatccagtccgcctgctgagtacttttgtggagggaatgaagctctcagatctttataatacttatggaaagatcaaaaaagatcaggtttcgccgaaacagttgttgaaaatcgttatctatgcaggaatgaaccggatctattccagtcgcgatatcgagaaatcgtgtagacgagatatcaattttatgtatcttctggagggaaagccgtctccgaatcatgcgactattgcgcggttcatctcactgcatctgtcccaatgttcctcaaacattctcgcagaagtttcaaatatcttatacgaattaggaggaatttctggaagacatatatttattgacggcacaaaaattgagtcagctgctaacagatatacatttgtctggaaaaaggccgttaccaaaaatcagacaaaactgtttgcaaagattatagaagacatcaatggaacagcgtaataaaacactgtatgtttcaaaaaccatgaaacagaaaagggcagaagattttgaacgcataaccagcccatacggaattcaacttagagtgaatcgaagtatacaggcagaaaggtccttcgcttctgtaaaacaggatatggaattcagacgatatatgtaccgcggaaaagaaaacgtcactgcacaaagtgtcattcttgcaatcgcacacaatatcaataaactacataataaaatacagtctgaaaaaacaggacagcatctgtttaggctgaaagaaacagcataaatttagataattcaaaaaaagaaaaagaaatcccaggctttcttcaaagaaggtctgggtaagtatgctcaaaatcaataacgggtagagaaaagagctaattctaactataaagtcttacttttcggggtcacctcatagagtttaatcggagaagtgcatttttctacatttttttataggcgttaccccattcgaccattgagtcgagaatcggtttcaaagtaagtccaagttcgctgagactgtactcaactcttggtggaacctccgggtaaattgtgcgaataatgagaccatcattttccatggagcgcaaactatcggtgagaactttctgacggattccttcaagatttttctttaattcattgaatcgccaagggcgttccagcaaatttcggataatcagtaatttccatttactgccaatgagcgaaactgtggttgcaaccggacattccggtaattcttcttttgttaacatgtgatcgcctccttatataatatccttttttattgttatatttaattttaatctaacaataaaaaagaagcaataggttacaaaaaagtaactagggttacctttttatgcctatgtaataaaattgtgcgtacttttgccggttaaaaattcttgatattataatcttgcaacaaagataacaacaaacaaaaatatcaggaggtaacaaaatggcattatcaaatcttttcggatggaaaaaatcagaaacagaagctggttcagcatgcggagcagcagacaaaccagcggagaaaccggcagcatgcggaacagcatgtggagcagcagacaagccggaaggctcaaatcgtccgggggacgattgctttgagcggaccggagcggagcgtagacaaccagcagcgtgcggaacagcatgcggagcagcagacaaaccagcagagaaaccggcagcatgcggaacagcatgtggagcatctgacaagtaaaataagttaaggaaggagttggataggatgagtcagtatttttcttttcagtggcatattacagatgaatgtgatcagcggtgtaagcattgttatattttctcaggcgaaggctgtaaggaattaaagtctatgacatggaagcagatgacagaggtagtagcaaactgtgaggatttctgcaaagtatatggcagagtaccatatttttatattaccggcggagatcctatccttcatccggacttctggaaattaatggtattactgaaatcgaaaaagataccttttaccttaatgggaaatccatttcatttgaacgacgaaatttgcagaatgttaaaggtttgtggttgtgagaagtatcagatgtcccttgatggaatgagagaaactcatgactggttcagaaagccgggaagttttgatctgacgattgagaaaatcggatgtctgaacagagcaggaataaaaagtgtaattatgagtacggtatccaaaacaaatatggatgagataccggatattattgatgaagttgtaaaagcgaaagtaaaggtttttgcattttcgcgctatgtgcctacaggtggtgaagttgacacaagcatgacacaggaagagtacagaaaacttctggaagtctgcgatgcaaagtataaggcatatgaaaaggcaggatgcgagacctatttcaataaaaaggatcatttgtggacgctgtatgaatatgaaacgggacagtttaagcttcctgagagtacagaggcaggaatgatctatggtggctgtaactgtggaaactgtcatattaccatatcttccaatggagatattatggcatgcagaagggtaactgacagtaaagtggccaatatttttgaagaccggctggcagacgtctggatctgtcagatggaaaaatacagagattacgataaatttgtaaaatgcagcaaatgtgaacttaaggcatggtgtcgtggatgtccggcagttgccaatggaacaagcggtaacttttacggggcggatccgcagtgctggaaaacaagaaatgagattaccggggaggtgcttacatgttaatagatatcatcaaagcaaggcattccattcggaaatataccggtgagcagataagacgtgatgacctggaaaagattctggaagccggaaattttgcaccgaatgccggaggcggacagagaagtatgatggttgcgatacataataaggaactggcagcttacgtgggaaagttgaatatggcagattttgaccgttcacacctggcaggtagttttgtctcaaaggagcagccaagcacaattgatgatccaactataaaaaatgggttttatgatgcgcctacggttgtgtgtgtattctgccagaataattttctcttcaagacagcagatgccttttgcatgatggaaaacatgattctgcaggcaacagagcttggaattgcatcatgtattatctcaagaggctatgaaacatttgattcagaagaaggaagaagactgatgagcgaatggggagtgccggaaggatatgcatgccagggatttgttatattaggatatatagacgggaaacagccgaaaagtaagccaagaaaaccgggaagaattaaaattgtagaatagtattggatttattgaaaaaaacacttgattatatggagaggtggagaacagatggatttagcaacatgtctgaaaaaaatggaattggtgggagtgcttgcattcgcaacagtggacagtgaaggggcaccacagatacggaatatcagtgcgattcattatgagccggatgcactctattttttcaccgccagaggtaaaaatttttgtaaagaattaatggaagatggcagggttcagattcttgcttataccaaatacaaagaaatgattcgtttgtcaggaaaggcttacgcagtagcagagaatgagcagaaaaaatggatggatatcgtttttgaagaacagccatatcttgccaatgtatatccgggggatacaagagaaatcggaattattttctgtattgatcaggcggaagtggagtattttaatcttggcgtaaatccaattttccgggagacatatattctgggaaatgctagtgtaaaagaaaagggatattacataacagaatcctgtatcggctgtggcacatgtatgaaacattgtccacagaaatgtattgagaaggggacaccttttgtcatccggcaggagcactgtctgcactgtggaagctgttatgaaaaatgtccggtgaaagcggtgatcaggaaatgaatcaggatgacagaagaaaatatttaattgaaggattgttgaaagagcggccggaatatgagaacatgcagattccatcagatgcaggcaagcagaaaatactgctccgatcgcttatgaatataagaatgccgaagaaaatggattatgcatttttgcagattcaggatgcgtacctttcggaagaaaatgagaagaaagggattgtcacattggcagatatcagggaggcacagcctgatctttatatctggaagggcgatattacaagacttagagtgggagcaatcgtaaatgcagccaacagcggcatgacaggctgctatcagccctgccataattgtattgataattgcattcatacctatgcaggaattcagcttcgaaactattgcaataatatgatgatagaacagggacaggaagaaccgacagggcaggcaaagatcaccccggcatttaatctgccctgtgatcatgtgattcatacagttggcccaatcgtacagggaaagctgacaaaggaacatgaacgtttactgatatcctgctatgaatcgtgtcttaggatagctgatgagaatgaggtaaagagtattgctttttgttgtatttcaaccggtgtgtttatgtttccgaataaaagagctgctgagcttgcagtacagacagtaaagcaatataaagaaaagacaaaatcaaagataaaggtgatatttaatgtttttaaagaggaagatgaacgactctacaaccagttactcagataagatattacagataaaagaaaaaattgaggaagcagaagcagttgtaattggggctggtgcgggattttccacatcagccggttttgtgtataatggagaaagatttgaaaaatatttttcggatttcagaaagaaatatggattttccgatatgtattcaggaggcttctatccatataaaacattggaaaaacactggggatactggtgcagatatatctatattaatcgatatatggatgcaccaaaaccggtatatcagaacctgtatgatctggtaaaagaaaaagattattttgtactgacgacaaatgtggatcattgttttcagaaagcaggattcgctaaaaacagaatcttctatacacagggagattacggcttgtttcaatgtagtgagccttgtcataaagaaacctatgacaatgaagaaatcataaagaaaatggtgctgagtcagggatttcagatgaaagacggggaactgcaaaaaccggaagacggagaaataaagcttacggttccgacgggtctgattccatattgcccgcgctgcggtaagccgatgagtatgaatctcagatctgatcagacatttgttgaagatgagggatggcactgggcagcagaacggtacgagaaatttatacaggatcataaaaagcagaaaatagtgtttcttgaacttggtgtaggatataatacccctggtattataaaatatccgttttggcagatgacaaacacatttcaacatgcattttatgtgtgtctgaaccagggtgaagcatatgcaccggaagaaataaggaaaaaatctgtctgcatgaatgaagatattggagagatcctgaaagaactgtagacttgtgataaagggcggctgtgaacagagtgaatagtgacaagagaggggatgataaaatgataatacaaacaggaatgagaacagatatacctgcattttattcaaaatggtttttgaatcggataaaagagggatatgtatgcgtgaggaatccctataatccaaaacaggtgacgaaatacagcctttcaccagaagttgtggatctgatcgcattctgcacgaagaaccctcttccaatgctgccgtttcttgatgagttaaaaccgtatggtcaatactggtttgtaacaattacaccttacggacgggatattgagccaaacgttccggataaagaaactgtgatggaaggttttaaagaattgtcggatgtcgtgggcgcagacagtatgggatggagatatgatccgatttttatagataaaaaacattctgtggagtggcatatatctgaatttgaaaaaatggctgaaattcttgctggatacacaaagacttgtgtaatcagctttatagatatttataaaaaggtggaacgcaatttcccagaagcaaaatcggtacgggcagaagacagggctgtgataggaaaagcatttgtaaaaatagcgtcaaagtatggaatggtgttaaagccttgtgcagaaggagaagatcttgcaaaatatggtgcagattgctccggatgtatgactgttcatacatttgagacagctctcaatagcagactggaagttccaaagagaaagaaaaatcagagaaatggggaatgcgcatgtcttttggggacagatataggtgcctatgatacttgcggacatttatgtaaatactgttatgcgaatgtaaatccggttttggtcaaagaaaatatgagaaagcataatccggactctccgtttttaattggtggatatcgtttatgattattacagcaaggatttgtccgtgaaagttaagaccgcaaagtatcagaagatgaagcaaggaaaatatcttggtggtcatgtgccttatggcctgatgaaggacccgaaggataagcataagctgattattgatccagaggcggcagtagttgtcagggagatatttggtatggctattgccaagatgcgtctgattgatatggcacgaactctgaatgagaggggtgttgaaacaccggggcagtactacagacgcaagcatccagggacaaagaagtttgttaattcttctgataaagcttgctggacacatgccaatctccgaacgatattgaagcaggaaatgtattatggcgctattgtaggtcataaaaggcaaggaattggtgttggatgcaagcatactgcatcagtaccgaaagaagagcagtttatcgtggaaggtaggcatgagggaattattactaaagaggattttctgaaagcacaggaaatcttttgcgagattggtgaaatgaagaatgttattccaaagacatatcctctttacaggaaagttaagtgcggtatctgtggaagggcaatgagttataagacatattctcgtaatggagttagctacaggtattttacctgtccacatgcaaaagagcagacaggcgaagatggatgctgcaagcggtatgttatagaagataatctgaatgagatagtatggtctgtgataaggcagctgcttgctatgacagatgcctttaagcagaaactggacaagcagaataatgtcagcagacaggacaatctgattctggccgaaaaacttgccaggttgcagcaggaaaaggaaaaatgcgaatcagacagatttgtaaatgtggatcagtttatggtggggcagttggataaagaaatgtaccagagaagaagagcagatcttggtaggttggctgaaaaactcgatgctgatatagcagaactggagcagaagcttaaggctgcagaaaccatgaaggatgacagcttatcacaagctcttggtgtgatgaagaagtattccggagcggatgaactgacacaggcaatggtgcaggaactgattgagaaggttgttgtcatggatctagagcatgtggagattgtttggaagttcaaggatgaggttaggaattttatagggatttgagtgtagaagccggttggatgatgagtctgatcggcttcttttcattgaaaaaagagtgggtttgatgtacgattaattatatgaataaggtaacttgttttcggtagataactggaattacggtaaataataataccgaactggacataaaggcaaagtgtatcgagcaaggaaaaaccaggtgcagattgcagaaggaattgataatacaaaagcctatgattacttcctattaggaacactgtaaatacaag

SEQ ID NO: 3530 - DNA, 38736 bp, Unknown
  gut microbiota DNA sequence
aaaaacaaagtcagattcaggtttgaattttactttcataaaaagtgcctcctaaatttaattccttgattaatagtgataatttgggtataatgtttataaggacaaatatattcgcgaacgcaaacctatttgttaaactaaatatatcactataaattaagtttgtcaacgtaaatacaatatacgtttgcatacctgtatattaaaattaagaggtgtaaaatgctgatttatacaaaattatggttattattagaaaaacgcggaatgaaaagaacagatttaaaagaaataatgtcatcagcaacactagcaaaactagggaaaaatgaacctgtatcaagcacagtcatagctaaaatatgtgattttttaaactgccaaccaaatgatataatggagaatgtcacaaaagaaaatatagaaaaagcaagtggagaattaaacgaaaaagtcaatgaaatgttgaatatgctaaccctttcaactggaatgagcaaagaggcaatattagataattttgtaaaagaattgcctgattttatagatgcactaaaaaaagataatatcgacctatttaatgactatgtgaaaaaaccaaaagaataatataaacagtacttctgcaaatgcttaggtattgccaaccgcaacgctataaagtaatcaagaggacgttaagcaggcctacggcctaacgtcccctcgcttacattgtagcgttctttttgtgtgtcaatggttgccctacggcgtatcgcccgccagctggcgggcttgccccttgacacacggctactggctacactctgcagaactcttatcaatggaacgataatagttgactatcatagtctgcaccagtgccgttttagaaatcccatagcgcttagaatctgtatcaatacgatcataaagcgttgtaggaacatgaagagataaccgggacatttcaattctttttcgcataaaatccacctttctgtatgaagacattttttgaagacaaacaataaaacagggcatttttcctttcatttacaacgtttttttaccctgtattattcgaatcccgtctcgcgctttttttattttctgaagatcctggttttgcaggatcttttatttttgtgtataaaaatgaaaaagcaggctccgaagaacctgccattcatggtacaataagatcggcacctttttcctaagccagcacttttccttccgggaacaggcttctgaatacagttcttactaacggtcccgcaacgatcagctggaaaggcagcgccataataaagtttttaggaatgttggtaagccagatgatcagcagcaggttccactgtccggaacggacacaggcttccagtccgccatagaaagacatgatgatcaccattggaactaccatacaggtagagataacgatcactttctttaacacactgctgtctctgtttacaaagaaacggaaagcaactcccttagcaggtccggatactacaaaccagtccatacagaaagcaaacacaacggcaattggaaatcccagccatccttcacgaagcacctctgtgctgaagccacccatatgaagggtaacattatacatgctcatccagagcaccatggtaaaacacatcattacactgtagatcagactttctcttttgttctgcggcatttttcatttctcctttttcattttcatgtacttttttatgtttgcatacgacaacctgcctgatcaggcagatgcgcatcgtcagcgcaaaaaaagagaccatacggggacctggaaacatgttttcatgtttcacggtgactcgtttgatctctactgctatatctcatatattcgtatgcaatctcactgcgtcatacgcttgcgcattctgttttgacaaaacactattatagcggctcttttccggtttcgtaagtactttttttgtattttttacatttcgtcactttctataatacactatatctgtatacagtatattttgtacgtcacttacaacaccattttttagccggtcagccccttcttactggttctggttcagatattccatgatccccatatgtaaggtccaggccagccggtcctggtactcctctgtttccagctttttcgcctcttcccggttggataaaaagccgcactctgcaatgacaatgggttctttcacatgaaggaggagataataattatcgttggcttttgcctgccttttattactatctcctaaaacatagtcaaaccgtttctgcaaactttctgccagtttctttccccggacagaagtcttataataaaatacctgtccgccccggatggcctcttcatggtagctgttttgatggatactgatcaccagatccggctttgcctcttcgatcagctggcagcgctttttcatatccgccatttttttatgagtatctttgctggaatacagcccggtatccacatctctggtaagtaccacctttacatccgaagcctccaaatacgttttcagctttttagccactgccagattaatatctttttccagctgaccatcgatccctacttttccgggatctgtgcccccgtgtcccggatcaattacaacaaccgcctgtttttgctctccgggtccattttctgactgtatatactgcatcccggctgccgccagtcctcctgcctgccaggataaaaaagcaacggttccaagaaggactactcccataagcagctgataaggagactgtttcatgttccagacctgctaccttctttttatccagtatattccctttttcctgaaatcagtcaaaaatccggccggagaataattaacgatcaatttacttccagatagttataatcctttactgcatcatctacaatgtattccagatattcaaacagcaccataggataacaatattcctgccacatcttatatgcaggtgttgtcgtagcctcttttaccacttcataggcttttccgccatagcaggctgcatttaactgtgcatatacctcggacatctgctccttctgacgctgggtcagttttacaaaaagatcgcctgtttcctcttcctcagagtccttcattgcatcataagactggttataaaaaatggtccttaatgcagccggcgcataggtattaaaattcaacaggttctcgtctgtacttttatgctttctggcccatttttccatatctacctgttgtgtgtgataggaaaagctttcatcatcccggtattccagcactccgtactggcagggaggtgtagaaagggaactggtaacaatctcataaatacctctgtcttcctcattcctcatataatgctgtacatggagatggccgcttaaaaacaacggtacattttcctcttccagacggtttaccagttcttcactgtgttcaatggtgcagtcttccacatagatcttactttcgtctaacaggttgtgatgggcaacaggaagaaggatcacaccgtcatcccaggcttcatctaactggtcgtcgatccagtcataggtctctgtttttatcattccccccactttattcgtaggactgtactgacagctgtccagcattaaaaggcgcatatccggtccaagatcataagtataacttagggaagccggatccctgctcagtgcctcatcgtatccaaaatcattgtagatctctgcaaactcattggcagaaactgcctctgccatctgtcttgaccttccatcaaaagaagctgcattcctgttattgatatcgtgatttcctggaataaccaccacctggatcccgtctttttccacctgttccagcttcttagccagctccttatggctttctttttctccgtttaaagtcagatccccgcttaaaatgatcacgtccggagaaagagcttctacctgttcaaaagcagcgtttgtgatctcccacacatagttggtcagttttccgtccccatgttctaccatgtactgaaattcttcccctttatctgtaagggaatctgccagataatgaatatccgtcatcaggacaatgcgctttccgtttttcatcggttccgcttttgtctctttttccccgtgtggaaatggttctatatcttccggatgggcatcggttggtttctccgtttcttcttctgtctctccggtgggctgttgttttgtttcatcttttgtctctgtttctgcctgggaagcatttgcaggctgtgtttccttatttcccggatacaggctgcatccggccgcagacatgcaaaaagcagacagcagcgctgccgtcattataagtctcttctttttcatccttcatccctctatttcctgtagcagttcagtcatggctgaactgctactattttacttcatccataatcgtccagatatccgctgtctcaaatcccagcttccagcaggcaattcccgccaggtcatactgattgaccaggtcttttttcagtcccagggactttgcctcttccatccagatcttctggaccccgttttcattttcaatttcaccatagtactggcctaccttgtcctgccaggtcagttctacattattttcatctacccattttttggcagctgtcattccataggcctttgatgtagtctttccgtctttttccgtccacactcttgtatagaagggaacactgttgatcagtttttcctttggaacttccttaagtgtgccgataataccattttccacataggaaatggaagcaacggaacctgcatctcctcctgcaaaatgctcatcatatcccatgacgatcacataatcagccacgattccctgttctttccggttgtagaatgcactgtaaacagcaggaacataatcatctactgacagaaccagtcccttctgtctgcatgatacggacatttcacggataaactgtacatagtgaggacctgctgaggatttcaggctttcaaaatccaggttaaaaccgtcaaagccataggtatctgcctctttcatcagattttcgatcagcttttttctggtcgcagtagaagaaaacaatttgccggagtctacatttttcacgctttcttctgtactgatattgtcaaacatggcccatacctgaattcctaaagcatgtgccttatctacataatccttgcttgcaagggacgtataattgccctcgttgtctgttatattaaaccaggtaggcacgattacattcataccctgggccgtatctgcaaccttgtcaaaggtagcatttgcatcctttgttgtcacctgatgaaagcccagacgtacttttccatccatggaaatgtttgtatacacaggcgcattaaattcgctgaccggtgtttcttcctccactttgcttaaacggctgtttggcacatagcccatataaccatcttctgtgcgcactttagaccatttatccatctgctctaagatctgcacagaggttcccttttcttctgtattgatgatctcactgcggataccaccttttatccgaagagctgttttatgacggagtgtggctgtctcatatgtatcccagtccgtatcaatgaaaactcttttgatctcactggtagcaaaagcctcttcccggatatccgtataatttttcacaagccctaaagaaagataggtttccccgtccttttcttttaaaagaggccctgcttccccttctgtggactcatccgcatagacgatctcctccggaagggcataaactaaaagtttctccccgtcatcccagtaaaaacgctggtttacatagtcatccacccagtctaccggcagatatacctgtccatcctcgtaaataccttttgcttcctgaagctcgttatctaagatcagagccacctgattccctttgatctggaaaacatcccgcttatctgccatcaccgttcccggttttaaatattttccatataaaaatccggctccacagcctgctgcaagaaatataaaacctgcaagcaacgccggtccgcagccgcctttttttcttctggtacgttttctgcttcgtcctgttggtctgttctgcatatcttttcccttttcattctgtatgtactctcaaaacccttactgccgtacttttatctgttctgctatatttccaactattatgcagtttatcacttatttttaaacgtaacaactatatatcagaaaactttaaacgttttgaaaccatttcccggtacaaaaaaatacccggtagacagccatatttgcttgcaggccgagatggttattttctcgatttactgtccaccggatattttatctttttatctttttcttttattttctctttttcttttgatcttctgaaagatataccttatcaaaacggatctcttttaaaccgcctttatcggaacagacatagtctcccatataaaaggctccgtcttctcccacatcaaagatcctggtccagtctgcttccctgcattcttttccgtcaatgataatagggatcccccgtttcttaaaacgttttaaaccatccaggtaatcttttcgatgtcttgcatcttcatttcttttcttgcttttcatactgtaactttcccccaccagaccgcatcctgtttcggaggccctgtgacatatatcttccaggatacggccagttttcttttataccaatatatccgcaaaccattccatggtctgaatgtccactgaaaatgcatctactgaaagagggatccgtttcacagaaaggcgaaactgtctttctatttcttttctcacgatctcgctgccaaaagcagtcaggcagatccagtcttttcccgttttttccttttctgtaaacagccccaaaaatgactccagtttccattctgacaggtctgcgatcaggatcttttcagagcaccgaagccactccggaaagacctcatctctcacttctccaaagtcaatgaggatctcctgatattttttttccatacacgcagccagtacctccggtccgccctgacaataaaaatccacctccaggacccggaaaggttctttcttaaagcggcctccttcttttccggaagcctccagaaaatttctcatccgttctgtatccttatgggaattccactggatcacagctgttttcctctgtttccagctgcaaaaataattagccgcccggatactgaaatgagttaccccggttccccttccagctcctatgatcccggttacttttactgtcgaaaccacgaaaatctcctttttttcatgctctgctttttttccgctttctgtatacaatcccagagagatcttaaaaagctgactccctctgctccaggttcaaaagggcttatgtattccggctccagaaaaagaaagggcttatgccccaaagtcatatctttattcttctttccccgggcatgccgccagacaagagccatcgggcccatattttcttctttcgatccggtcatcttctccaacatcatttttgccttcccgtactcccacaggttttcactgatcactgccgtaagaaaatgatccttctcttttaatgtctgtcctgcctcttcccagtttgtgccaaaatcttttataaccacttcaaactctgtatttgtatccagcttcacagccggaccgtaccagggtttcataagacatccctgaatatgatagataccacggccatcaatccgcgccccgcctgtactttctgccatgcgccttactgctcctgtttgatttctttcttcatacaggacttttatccccattttggtaagatagacgcaaaggccaaaagccagatgggtagctccggctcccggtgtactgcctgcgatcacaatattcagagatgataccgcattattatctgcgctgatcaggcgcccgccccgtacagaacgctccagtgccagttccagttcttttgctgatggatagcgctttgttctgtctggttccatacattttttaatgatgttctgaagcggccctgatactgtgatcccacagtctgtttctgcccctgctttcagggttccgtatagcataaaccggaggatggcaccaatggcataaatatccgtcctttggtctaaaagctggtcagttgtatatagttcaggtgctgcgcagcctgcagtaccataccgttcttttcttaaactggcgctgtcgctgtctccggcatggtcaaaatcgatcagctgtaccgtgcctttccagatcatcagatttttcggttgtagatctaaatgtaatatgggtttatcacaagaatgatgtaaatattcaactaatgaacagatctgccgcccatagcgaacggcttctgcttcctgaaatggtccctgatcttggattaggtcatacagagaattgccttcaagatattcctcaataagataaaagtagtggctgtcctcttccagatcataaaccagtgggatccccggatacttaagttctttaagcaccaacgcttctcttctgaattcttcgtaatctttatgcgttttcggtacgcacttaatggcccggtactcgtttaatcccaggtgaactgctttccatacagttcccgtgcgtcctgctcccactgtttgaatcagccggtattttccaaacaggatctccctttcgtttcacctctctttcgttacaatatcatctcctttggctatcttatctgataagctgttacttgtctatggtctatataatgactacacatatagctgggacatggtgtatacatcttttcattcacattctttcttagaagtcaaagaaaaacgccatttcctgtgttttttcttttatcttctgctcatatagctcatttctgttgataaatgcacactaaaaattttaaatatatattattgatatttaattgatatttccacccattatgtagtatattctaattgtagaagtttatcttcataacacgtggcactaaaacacacgacaaaacacaaagagaacaggaagtgatcctatatgaaaatagaacgaattagtgacaatcagatacgctgcaccctgacaagcttagatctaagctcacgggggatcaatctggcggaactggcttatggctctgaaaaggccagaaacctgttccgtgaaatgatccagcaggcagcacaggaagttgggtttgaagcggaagatattccgttaatggtagaagccattcctctgtcttccgaaagcattatgcttattgtgacaaaagtagaagatccggaagagttagatacccgcttctccaagttttctccttttgcagaagcagagtcagaaaatctcctttcccagctggcagatgaatttctggaaggcgccggtgacctggctaaacttctgggacaaaacggaacagaggaacttaaggcaaatgtaaatacagctgccgaaaacacaggaacagagaatgcaaaagctccacagatccaactgcgcactttccgttttgacagtctggatcagatcagtgaagctgcaaaagctgccgaagacagctgtgatgacattcacaacgcactttataaaaaaccatccacccgtcagtattatctggtattaaataataaggactgcaatgaactggatttctccagagtctgcaacgtgctggctgaatatgcggccaaactgccaaatgaatatgcgggagaagcctattacaaagaacattatgaattaatgatcggagaaaaggctttgcagaaactaaaaaatctgtaaaaattaacgccccggatatccggggcgcgtttgtttatttgaaataatccgggaattcctgacggaattttccttcatttaactgccaccggctcaaatgcttttccatctgggccatggcattttcttttttatgctcggcaataaactggataattttcctgtgatcttcgataatggtattatctttcactgtatttacagaaaggctgcggatacggtcatagtggatagccagtttctggcacataccataagtcagttctctgtggcagatcataaacagcttatgatgcatctcatcatctaactgcattaccatttccggccgggaattttccatataaaattcctgcagtcctacattttcctgcagccattttatatcttcttcggttgccatttcacagcacattcccgcgatctgcttttctaaaagcacacgcagggaacgggcttcttctaccagttccacatcgattggcgcaatgcgcataccgcgttgggggaatatttctataatacgtgactcttcgcttaactggatcaccgcctcccgcacaggagtccggctaacgcctatttttgccgcaaattccatatcattaaaggcttcacctggctttaattccagagaaataacctgttcccgtatcatacggtatgcgtattccctggctgtttctcctgatctttttccctgtgcgttcatggtttcatttctcctgttttctgcttctactcctgatgtgcgtttccattctgctttacgattgcttcccacagtccgttcaggtagcatgcacccaacgcacggtcatacaggccatatcctggcatggaaacctcaccccagatcgctcttccgtggtctgggcggataatgccgtcaaagccgatatcatacagcgctttcatgatctcatacatatccatgcttccgtcagctgataagtgagctgcttcctggaaatctctgtaaccattatactgcaagttgcgcacatgtgcaaaatgaatacgtccctttaaagaacggatgatgtccgggatatcattttccggattgcttcctaaagatccggtgcagagagttacgccgttaaatggtgcatctactgccttcatcagttttaagaggtgctccttatcggtaatgatacgggaaagaccgaaaacaggccatgcaggatcatctggatggatcgccatacggatatcgtacttttcacatacaggctggattgcttttaagaaatataccaggttgttaaataatttttcttcatctacatccttgtacatttcaaacagctctttaattcttgccatacgctccggctcccagccaggaagttcaaaaccattggacttctcacccatggactcgaacatgttttccggattgatcttgtcgatctctttctggtcatatgctaaaacagtagaaccatccgggcgtacctttgccagatcagaacgggtccagtcaaatacaggcatgaaattgtagcagactacatggatatctgcctgtcctaagcgctccagggtagtgatatagtttgcaatgtatttttcacggtccggtgttcctaccttaatagcgtcatggatatttacgctttcaattcccattaccttaaggccttttgcttctaccttctccttcatctgaagaatgcgctccataggccactcttcgcctgcagggatatcatataaagtagtgataacgccctttactcctgggatctggcggatctgctctaaagaaacagagtcaactccttcaccaaaccaacgcaatgtcatatccataatgtttacctcctgagtgtttaaaaattttaaattatttttattttcccaaatcagtgttgtgttaatatactaatatattactcaatatactaagtatcggcccaattgtcaagagtgcttttgtaaattaaacgcaaaaaccgcctgctgcaaagtgcttttcaacttgcactttacagcagacggttttttacatcgggtctttacccgtacatgttctcttgtggataaacttatctgtcagccaggatctcattcatcttggaaaccagatcatcgcagtcgattccatgaaccatgcatgcctcttccagagattcagcctgagaagctgggcatccaaggcagtgcattcctgcacccatcagcatctgagggatcagctcatccatgtggatcagttcaccgatcagcattgtcttttcgatcttcatgtgtatttcctccttatattctatatactatacgtaaatatgctatacgcttttatcagcataatacattttggattttttggcaagcctatttcttttgtaggtttacctttaaacccgcaaacccttgtatttactggcgttttagatagttttgactaaccattttgctcctaaatttgtacaatttatacagctttagggggtattttcctcttgaataattgtccagaatcgtttacaataaagaaacaataaacgagattgtttttgaagtttcaaaaacatctaaatatataaggaggtattttatcatggcatatgtaattactgatggttgtgtaagctgcggaacctgtgctggcgaatgtccagtaggtgcaatctctgagggagatggcaagtacgttatcgacgctgattcctgcatcgagtgcggaacctgcgctgctgcctgtccaaccggcgctatcgaaggctaattataagctacataagaaaaccacagagcatttgctttgtggtttttttttctatcatataattaatgtcaaaaaggacgtaatacaccatgactcaaaaaaagcccatcatcggcatcacaccatcacacaacactgaaaataatgataccagcctccgtcctacctatccaaaagccatcgccgcagcaggcggactgccgatcctgcttccgttggaatgcagcgatgaggatataaaacagtttatggacgtttgtgacggttttctttttacaggaggaccggacattaatccatttctttttggggaagatacccatttaaaatgtggaaatatatctgctgccagagaccacctggaatttcgccttctttcggctgctatggacgccggaaagccgatctttggcatctgccgaggtgttcaggtattaaatgtaggccttggtggaagtctgtatcaggatatcccatcccagacagaacgggaatttcctatcgcacaccagcagccgttttactataatatcccatgtcaccgggtgaatattacagagaatactctccttcactccatctgccacggtgagacccagattgctgtaaacagcagccatcaccagtgtgtgcatattccggcaccgggactggtagtttctgcggttgctccggacggtattatcgaggctgttgaaaagcctgattacccgaatttcttcctgggagtgcagtggcatccggaatatctctgggacagagatgaggctgctatgggactgtttcaggcatttatggatgcgtgtaaataatatttccctgctgtcaaaaccgcagttttcaacagatatacttcaatatgattgctttatccacaaactgacatttggttttgcacattgagaaactgagatctgcttactccgcaaattcccagttctcaacttcatctaaagtcggtacagatggtgctgcccctggtcttgacactgcaattgcagacgctcttgatgccaggtccagtgcctcttttgggcttttgcccttgctgatggcggatacgaagaaaccagtaaaagtatcgcctgcagctgtggtatctactgcttttactttatagcacttttgtgggatcacctggtctttgtcaatataaacagaaccctgagagcctaacgtaaggacgactgctgcctgcgggaacatggagcggaaagctgccgctgcttcctgtgtactttccagttccttctgtcctaagatctgggctgcttcaatctcattcacaaagaacagcgttaccttgtccaatgggagcgcttttattttttcatccattggggacggatttaacacgatcttcatctgtttttcagctgctttttccatcagataaggcagattgctggtctcgttctgtaaaactaaataatctcctgcatcaaactggtctaatgtagcgtcgatctgttcttttgtgatccgctgattagcaccgccatagagaaggatacagttatctccttctgcatcattttggataatggcatgtcctgtggaacactggctatctaaaactaccagatctgtgttcacaccagcttcttttaactgctctacaagaaattctcccccttttccgatccttcctgcatggaaaacctgcgccccggcgcgtcctaatgcagtagactggtttaagccttttccgccgctgaaaatgttcatctggctggaagagatggtttcgcctttttgtacgaaatggtctacgctgtatacataatcgatattcagtgaaccgaagtttaatattttcatgtaaataacccccatttgcattttttaacattatagcatacttacaatccctgcactagcgtgcttgtgccgcctgcgtaagcaggcggaattttctcatttatagcgcaaaaaaacgcagccccataagctacaggactgcgtttttcttatacgttacgccggctctcatcttgcgtgacctgtcggtcccacaagatgcatcggatggtcatccgatgtaagatccagtcttttttcgttttatttctgtgggccagctgctaccagtgctttaccagcttcgttgctctcgtacttagcgaagttcttgatgaatctgcttgccagatcctctgccttcttctcccactcagctgcatctgcgtaggtgtcgcgtgggtcaaggattgcaggatctacacctggaagttcggtaggtacttcgaaatcgaagtgagggatcttcttggtaggtgcctttaagatatcgccgcttaagatagcgtcgatgataccacgggtatccttaatggagatacgcttgccggtaccgttccatccggtatttactaagtatgccttagcgccgctcttttccatcttcttaaccaactcagctgcatactttgtaggatgcagttccaggaatgcctgaccgaagcaagcagagaaggtaggtgtaggctcagtgattccacgctctgtaccagctaatttagctgtaaatccagacaggaagtaatactgggtctgctctggtgtcaggatagatactggaggcagtacgccgaaagcatctgcggacaggaagataacgttctttgctgcaggacctgcagagattgggcgaacgatcttctcgatgtggtcgattgggtaggaaacacgggtgttctcggttacgctcttatcagcgaaatcgatctttccttctttatccagagtaacgttctcaagcagagcgtttctcttgattgcattgtagatatctggctcagaatccttatccaggttgataaccttagcgtagcatccgccttcaaagttgaatacgccattgtcatcccagccgtgctcatcatcaccgatcagcagacgcttaggatctgtagacagagtggtcttacctgtaccggacagaccgaagaagattgcggtgttctcaccgttcatatctgtatttgcggagcagtgcatggaagcgatgccctttaatggcagatagtagttcatcatggagaacatacccttcttcatctcgccgccgtaccatgtattgatgataacctgctcacggcttgtgatgttgaatacaactgcagtctcagagttcagacctaattccttgtagttctctactttagccttggatgcgttgtaaacaacgaaatctggctcgaagttttccagctcttcagcagtcggcttgatgaacatgttggtaacgaaatgtgcctgccaagctacttcaacgataaaacggattgccatacgagtgtccttgtttgcgccgcagaatgcatctacaacgtaaagtttcttgttggacagctctttctgagcgatctctttaacagccttccaagcctcctgggatgctggatggttgtcgttcttgtattcatcagaggtccaccatacagtgtccttggagttctcgtctacaacgatgaatttgtctttaggagaacgtcctgtatagatgccagtcataacgttaactgctcccagttcgctgacctgtcctttttcataaccttccagttctggtttggtttcttcctcaaataacatttcataggaaggattgtacacaatctctgtggttccggtaatgccatactttgttaaatcgatttttgctgccatcttactaacctctttcctttcgtaattgatcataagggatagatgcgattgtattttttcgcatgcactacagattatcccactaatttgttaaaatgtcaacaaaggatagtagtaatattttaacgtatttttatcagtttttactgcatttattcggcgaattgtaaaaattgtaaaaaaaggatctccgtgttaaaatagttgggaatagagatactgggaacgaatacgaaaaaagtaattttgaaactgaaacatcaggaggatcttacatgacaactctgccggaaaaaggcgaagagatttttggatataaagtgatggaccagaccactgtttccatgttgggagcccgtataacggaactctcccatgcctgcagcggtgccagagtcctgtatatagaaaatgatgaccgggaactgggttttaacctgatctaccgcacgccccagttagaccagtcggacagcaaccacattttagagcatctgatgctgtgctcctgctcccgctatcccagccgggatattttctttgatatggacagcaaaagctattctacctttatgaacggccttacggataatacctacacctgctatccggtgtgttcccagagtgaggaccagttattaaagataatggatgtatttttatgctgtatggaggaaccggatgccttaaaagaagattatttcttccgtcgggaagcactgcgctatgagctggaaagtgaagatgaggaactgtctttagaaggaaccgtctttaatgaagactgggggcatttaacggacattcaggaaaatgcagacagctttatggcggaaactctttatgaaggccagactgcttcccatttacttggccgtgcacattttcattacaaggatatttcttttgggcggatcagggagcggtttgaaaaattttaccgttattccaactgcctgatcgttttatacggaaaaatggatattgcccgggttctgacttttctggacaaagaacatttatcccgttttccagttgcagcgggcatagtggatcatgatcttctttcttatttccatgaaccggtaaaacagggatttttcaaacgtcaggcggaaagtccggcttatgagggaaatccgggaaataataacgggatcattgattatggcatcgacctttccggctgcagtgagcaggacctgattttctgggacatggtaacagatattttggatcaggacacctctgccattcatcgtgccgcccgtgaaaagggtcttaacaatgtgatcgaagtttatctggatacagcaccggctctcccttctttaaaattccgcctgcacaatgcaaaaccgggacaggatgaggagtttttagctgctgtaaagacaggtcttaaagaagtttccgaaaatggcgtttcttcagatctgtttcatgcagttttaaaagaaaaccgtctttctgactgtcttaccagagaggcgcctcatcttgggttccatatttctgaggagatcggtaaatactggagcacaacggataagaccggatattttactctttatgaaaactgttttgataccttctttcaggatgagaaacaggatattttgcgcagacttgctggagatgctttaactccttctttaagtgccgttgtcaccactgttcccaaaccgggtctggcggaagccatggaagaagaaaaggaacagtatttgaaagaaaaaaaggcttctttaagcaaaaaagagattttaaaattaatggaggacacaaaggatttccagatctggaaccagaatgaccagtgcaatctggactttctcatacagccggaagatctgcccggcccggaagcagagccggtgatctctgaaaccgttttacatgatatacactgcctttccagtgcggtttctttaaaggggatcggctgctatcagcttttctttgatatcagcggtttgaagccttctgactggaattacctgaccctctatcagatgcttttaacagaactggataccagtcattttacagtagaacagcagaaaaacaaggaacaggaactgctttatgactgtacttttgatgaactgtatccggaaagggaagctggcaagaacagtcatcctatgatgagcgtgttctggtatggacttacagaggattttgaagaaggtctggaactgcttttggatcttatgggcggctgcgattatgaggactgtgagaccattttacgggtcattgacaagtatctgccggattatgacatgtccaggtctgacaatggtccatctctggcttacagccttacagagcggtatatcaggcgggacagttgcttccggtatctgctgaaccagccaggtatgtatgactttttgaaggagatacgggatgtgctggagcgggcgcaggaggttgaaaagtcagtcaattctactgattatactgatatgcacctcagcagctcacataccccaggcaccactgagactgcgactctggacgtcaaagccctggaagccgcaaaacagatttctaaaaacctgcgccgggtggctgactgcattttaaataaacacaggcttgtattccttgcctgtgcagatgaaaacagcctggcatctattctggaacatagtacaaaacggctttcagctcttcatgaggtcacagaagatgcacctcttccggacagcattttcacctgcccacgcagaagtgccgctgctattgacagtcctttggaagaagtgcgtatgaccggtgattttggcaatgtttctgaatttatgggccgtcatcttccatttttgctggctgcggctgacaaatatattaaacctgctatccgctatcagggctgtgcctatgacagcggtgtggattttctcctgccaaaccggtattttaccttgtggagcacttccgactcacggatccgctctactcttgaaacattcgcctctgcaggagaacagcttgaaaacctggcgatcagtgaggaagacctgcggggctatattttaagcgcctatgcccaggcactgccaccgtccggcatgttaaacggccggatgcgtttcctgcgccgcagattgtttggtatttcaacggatcatatcaataaaatgataatggatatcaggaacagttctttgaaagaccaaagaacggctgccaagctgatccacaagatcttgcagaacagtccggctgccgttgtaggaaatgaaaagttgatcgaggaaaataaagatttatttgatgaagtgatgaagttgcattcataaaaatttatagaagctgccactggcagcctttgccagatccatagcaacataacaggggacgcattactcacgcgtcccctgatctaatttaacatctgtctggattttctctcataaagataaattctgctacagaacggtcaaatgtcttaatatgtccaaacagccagtcaactacgttcttctgtaccagttcactgaacttgtctgtaggtccttcataatcctgaagatattcatacagctcctgaatggacttcttaaactcttcatgcttctcatgatgctgtccgcgttccggataaccggctttttcctgaagctcttcctcttctttgaaatggaagtcagtgtactcatccagataatctaacattttaatggctttcaccttgctgtcaccattctgacaggctactacgaaatttcggatacggtcgatcagttctttgtgctgtgtatcaatggtattatttccggttactaaattgtcatcaaaagtaatgtttaaatcgtaagtcatagtctggcctccatttcttttatttgctgtgtttagcttatctttctcttgtgtgtttcaatgtctcagtgcttttccctgcttaaccttcaacaactatgaaaacatcttttcctaatccacaaatcggacatacccagtcatccgggatatcttcaaaagcagttccaggagcgatacctccgtccggatctcctactgccgggtcgtaaatatatccacatggttcgcattcaaatttcttcatagtcaattctccttttcgatttttatttatttctgttatcagatattccaccggatcttccggtgttttgtttttattttgttgctttgttttgtatgtctgtattatacatgataattcttctcttgtcaatattagtaatcattattatttttattttatttaattttttcttcagtctttgcgcaaaaccaaatttgctagtataatgaagcgtagtgaaaaataagcggctgcgaagcagacatttattttctacaagccattaacgaatgaaccgtctgcgcaagcagacagcgaagcgcctcaacagaccgcaaatatagagcgtaaaggagaatgatccatgaaccacaaaaccgttgttttcaacgaagcaaaaatgaactttgacggaaatcttgatttttccgttctttcttcagaagtagtcacctacagtgacaccacacctgatcagtttttagagcgcgtggcagatgcagaaatccttgttactaaagaaatgcctgtaagccgtgaacagatcctggcgctgccggacagcgtgaagctgatctgcgaagcgggaaccggttataacaacctggatctggatgcagcgcgggaaaagggaattactgtatgcaatatcccggcttacagttcggagcgtgtagcacacactgccattatgatgatcttaaatttaagttccaccatgcagacccagatggctatgctggcaaagggaaaccatgacaattttaccaaaaatctccaggttcctcatgtggaagtaaacggaaaaactctgggtatcatcggcgccggaaatattggacgcactgtgatgaagattgcaaaagcattggatatgaacattcttgtgtatacaagaactcctagagaagaggaggaaaatgtacattatactgatctggaaacggtactgaaaaacagcgactatgtttcccttcactgcccgctgacaccagctaccagacatctgatcaatgctgatactctggtgctgatgaagccaactgctttcctgatcaatacatccagaggcgctctgattgatgaaccggcactgatcaaagctttacaggagcacaagatcgcaggtgccggactggatgtacaggaaacagaaccgcctgtagaagacaatccgttatacacactggataatgtgatccttacacctcacatgggctggaagggcctggagacccgacagagacttttaagcatcttaaagggaaatattgatggatttatcaacggaaagcctgtaaatgtggtttcataaaaccggtcattttatatttacattaacgaagggataataaaaatactatgaacacacatttatcttttgcctgtgactatatggaagggactcatccggccattcttcagaaacttgtagagacaaatcttgaaaaaacaggtggatatggactggatccatattgtgacgctgccaaagaaaagatcaaagcggcctgtggctgtccggaaggagaagttttctttctggtaggcggcacccagaccaatgctactgtaatcgatgcactgcttaaaagctatcagggtgtgatcgcagcagagatcggacatgtaagcgtccacgaagccggtgctattgaggcagacggacacaaggtactcactctgccacatgacaatggaaagatcagcgcggaccaggttcgcggacttttagacggcttctataatgatgccaaccacgatcacatggtcatgccgggaatggtatatatttcccatccaacggaatacggcaccctttacaccttagaagagctgactgagctcagcaatgtatgccacgaaaaccacattcctctttatatggatggggcccgtctggcttatgcactggcatgcagcgaaaaccagctgacactggccgatattgcccgtttatgcgatattttctatatcggcggaacaaaatgcggcgcactgtttggcgaagctgtggtcattccgaaaccaggtctgatcccgcatttctttaccatcatcaaacagcacggggcattacttgccaaaggtcgtcttctggggatccagtttgataccttatttacagactctctctatgaaaaagtaggcgcaccggcgatccaggctgctgaccagatacgaaagactttaaaagagcagaattttagcctctgcttcggttcacctaccaaccaggtattctgtattgtagatgacactcttatgacccgtctggaaaaacaggttgaatttggtttctgggagaaatatgatgatacccatacggtgatccgttttgccaccagctgggcgactacaaaagaagatgtggatgcattatgtaatctgttatgcaatttataaaaaaggggagattaggttgagccggcaaggctgcccatttcgtcaaccccgccggctgtgtaatgttcgatcggagtcttccatgcacctgcctttgtggctgattttccgccaactgcgtccagattttatcaacgtacgcaccgcgtacgcctcaaaaatctgaacacagatgacaaaaaatcctctcacaaaatcaggcacataaagattccaatcgaacatatttttctctatagacagatacctctcactctgctgaacgggtatctgtctttctctatgtaaaaagctctgactgcttgtttatgtaaaagagtatacagaaaagttgtgtcctaagtttgaagcagtcataaagtatttctaaaaaggtttaagaaaatatgaggaaaattatgattttacattatccctgaactgctttcggtactgagaagggctcataccagtcacagatttaaataccctgttaaaatgagtcaggtttgaaaagcctgtttctttacttatgtctgtaatattcttacttgtttccataaatttacgctgtgcattcataatacgtgttacattaatatagcggatgatcgtactattggtattctttttaaattcgcggcacagataatatgggctgacataaaacatctgtgccagcatttcaagactgatctcttcctgataatggctgtggatataacggatcacctcaccgatcctgctttttctttcaggcgctttttccggtctttcttcccttgcgatcaacaataacagcatatttaataccccgcgggcatattcttcgtgatatgcccctggattcttctgttcttttaggataagctccattgcccggtggatctcctggcgttcccttatacccactttataaatgccgccttcctctcttaattcagaaaggatggagggccacaatatttcctcctgtgaaaaatacagcagtactcttttaaacggcatattctccgctccataggaatgatgcattacataaggaggaaaaattataaattctccagcttccattttataaagcttgtcttctaccatatgaaaacgttctccggcttccagataataaatctcataatattcatgataatgagactgggacatattgtcatttactccctgaatccgctcacaggctattccactcccctgggccatcaggattcctgcctgatctatcatattccatcctcctgtctgtgcaatattgttttcctatatctatttatatggttattttttaatgaagttgtgtttattgtatacaatttttatgtacttataacaatttttctttttgttaaatgtcctttttctcgtacattatagcaagatatgtaaaatttccacctgtaatatgcaatttttgtctagttcttatcttgttattttattatcatttcaatgcaaaacaacaaataaatatcttagaaaatcatcatatcacaaaacaaccataaagttaattatgtttaaggaggccaagattcatgaaagtatgcatgaatgcgacaactgtaaaacagaaggaaaattacttttctgtagctaccaactgcacagagatccggattttcttcctcaccgattatatcatccgtatcagagccggatttgacggtgattttgcagaagaatcctacagtcttgttacaactgcctgggaagacagaatggatccgtttttaaaggactaccgtaaaaaaatccagaccgctgacgctgttctggaagatggaacagatcaggccgtgatccagggaaaagaactgaaagtagttatagaaaaagatcctttccgcatctgtgtttacgataaagaaggaaccatgatccatgctgatattgtagatcttgcttaccgtgaagacagcaaccaccacaggatccataccagccagattgaagcagatgattgtttctttggttttggagaaaaaggcggtgaatttaacaaagcccagaaatacatggttttaagcccgggtgattccatgggatatgaccccaaagaaaccgattctctttataagcacataccattttatattaagttaaatcagactaccaaaaaagcaaccggatatttctatcacaatacctgggaatgtgactttaacatgggacgtgaaaagcgcaattactggcaccgttacagcagctactccaccaacggcggagatattgaccttttcctgatctcaggaccttcagtccgccaggttgtagaacgctataccgatcttaccggaaagtcagccatgcttcctaaatacgctttaggatatcttggctcctccatgtattatccagaactggatgctgactgcgatgatgctattgcagagttcatcgacactaccaaagaagagggaattcctgtggatggtttccagctttcttccggttactgtgccattgaaacagaacagggcatcaaacgctgcgtatttacatggaataaaaaacgcttcaaagatccaaaagacttttttgcccagatgaaaaaacgtggcatctgtgtatcaccaaatgtaaagccgggaattcttctgatccatccaaaactggatgaaatgaaagcaaaaggcatgtttgtaaaagccagtgaaacagaagaacctggtatcggcacctggtggggcggaaaaggcatgtttgtagactttaccagccaggaaacccgcaataactggaaggaaatgttaaaagagaatgtcctggattatggtacaagttccatatggaatgacaactgcgaatatgacagcatggttgataaagactgccgttgctcttttgaaggaaaaggtggaaccattggccagttaaagtctgttatgtccaatattatgtgccacatcaccaatgaagcgatacatgaaacctttgacaatacccgcccttacgttgtatgccgttccggtcatgcaggcatccagcgctatgctcagacctgggccggtgataacttaacctgttgggaatctttaaaatacaatattgccacgatccttggtatgggattatctggtgttgcaaaccagggctgcgatattggcggcttctacggacctgctcctgaagcagagctgttagtcagatggatccagaatggtattttccagcctcgtttctctatccattccacgaatatcgacaacacggttacagaaccttggatgtacagcaactgcacagaatatatcagaaccgctatcaaactccgttaccgcctgttcccatatctgtattcccttatggaacgtgctcatgaaaccggacttcctattatggagcctatgtgcagtgctttccaaaatgacccgaagtgctatgaagaaggcattgacttcatgtttggtgactcactgctggtagcaaatgtagtagaaaaaggcgccacaacacgtaagatctacctgccggaaggaaataaattttatgatttctatacaaggactccttacgatggtggacagacgattgaaataccggtagaccttggaagtatccctctgtttgtaaaaggcggcagtatcattccaatggcaacgaaccagatgaaaaatcttatgaccgaacagccaaacggaatttctattctttgcgcgcctgactgtgatggttcctttgtcctgtatgaagatgacggtgtttctatggattatgaaaagggctgctatttaaaaactttcatttccatggctgctggggagcgcaccgttctcacctttaaacaggaaggttcctatactacctctgtagaaaccatgtctctggacatgatccacagagaaaaagctccatattgggtaacggtagatggaaaggaaattccacattttcttcatagaagaaagtttgaggagactgactgcggttggtattacagccagactttaaagtctgtactggtaaaatatcctaatccgaaaaaggattaccaggttgtcgtttcctttgagcagttcgatctgatcggtatgtaagaaagaaaggggataaaataaaatgaaaaaactggcagcaattatagccgctgtaggactgtctctgtgcagtcttacaggctgtgctcaaagcggagttaaaaacagtgcacaagccactgctgaaaatccaatgatacttacacttgcccacggtcttagtgaaactcatacagtccatattgcaatgactgagtttgcagataaggtaaaggaacgtacaaatggaagaatccagatccagatcttcccaaacggacagctgggatctgaaaatgaaaatatggagcagctgatggcaggcgttatctccatgacaaaggtatccgcacctggtcttgctacttataatgaatcctaccataccttcggccttccatatatatttgacagcaccgaagatttttaccacgtaatggattctgaccagatgcatgatttcttcctttcatcggaagatgacggctttgtaacgctgacttattatacttccggtgcccgctctttttacacaaaaaataaagcgatccgtaaaccagaagatttaaaaggcttaaagatccgtgtccaggatatgaagtcccagacagatatgatgaaagctttaggcggtattccagtagctatgtcctatggtgatgtttatacttctttacagaccggtattattgacggaacggaaaataatgaaaccgctcttaccacaggtaagcacggtgagatctgcaaagtatattcaacagatcagcatgccatgatcccggatgttatggtcatgagtgccaaagtatggaaagagatcagtcctgaagaccagcagatcatccttgaagcagccagagaatctactgaaagtcacaaaattgcctgggatactgcaattgaccaggcgattgaagaagccaagaacacaatgggagttgaatttgtcaatgatgtagacaaagaagccttccgtgaagctacaagcggcatgatcaatgattactgtacacagtacccaggagttaaaaagcttcttgatattattgattcagtagaataagggaggttcgtcatgagagaatttttagcactgatcaaaaaatggatgacccgcctgttagccggcatcgctactgtccttctatccattatgacactgctggttttatatcaggtatttacacgttatattttaaacagccctgctgcttttacagaagaactggtccgttattttctgatctggaccggcttcatcggagctgcctatgccttcatcaccagggagcacatgtgccttgtactggtacgtgacagcttaagtccttctggaaaacgtattttaatgacggttattgatattctgatcctgctttttgctatttttgttatcaccattggtggatttaaactggctttaagtgcgcagaaggtattctctgcccttttaggtattccaagaagccttgtatacgctatggctcctatatcaggattatttatcattctggctcagatcattaatatttatgaagatgtaaccggaattgcagttgaaggagggaatgaatcatgagtatcggacttacaaccgttgtcttgtttgcagttttcggaattttgctgtttttaagctgtccgatttctgtaagtattattattgcatctattgtcactgccatatcctctctttcatgggatcagatcacctttatcaccatgcagaagatgaacagcggtgtagaaagcttctcccttcttgccattcctctgtttatcctggctggaaacatcatgaataatggtggtattgcaagacgtctggtaaacttttcaaaactgtttgtaggctggatcccaggttcactggctcaagctaatattgtgggaaatatgcttttcggagcactttcaggctcctccgttgccgctgcatctgctatgggtggctgtatctatcccattcagaaagatgaaggatatgatcctgcgtttgcaactgccgttaatatcgcatctgctcctaccggcctcctgatcccacctaccagtgcgtttatcgtatattccactgtagcaggcggtgtatccatttcaaccttatttatggctggctacattcctggtatccttatgggtgttggttccatggtagttgcctttattcacgcaaaaaagcataaataccctacttccggaaaaacacctatgaaagaggcgatcaaggtaaccttagatgctattccaagcctgcttcttatcatcattgttatcggcggtattgttggcggtatttttaccgctacagaaggtgctggcatttgtgttctttactgcctgatcctctctatctgttaccgtagtatcactgtaaaatcttttatgaagatccttgtaagcagtgcttgtaccagtggtattatcctgttcctgatctccgcatcctctgctatgtctttcgtaatggcatactctggaattccggcagctatttccaccggtattatgtccatctcaacgaataaatatgtgatccttcttctgatgaatattattttgatggtagttggtatgtttatggacattacacctgcaatccttattttcacaccaatcttcctgcctatcgcccagagccttggcatgacggatatccagtttggtgttatgctgatctttaatatgtgtcttggaaacatcacacctcctgttggttctgttcttttcgtaggctgcggaatcagcaagatcagtattgaagaagtaacaaaaaccctgcttccgtactttgcggtactgttccttctgcttttagcagttacctatattcctgcattatcattaggcgtaccgaagttaatggggctgatctgatcctttcaaaatcatttccggggctgtttaaaacacagccccttttttatatttctaagattttatatcaaggtgtttccattgttaatactgttaccgttccgtcatgccgtcttcttgtttctttaaaaaatctctggtaatctaacataaagtaggctataataaagcgaaaaacatttaggaaacaataaataaccatagacatagaaaccttagggaaagagggtgaaggaaatgcacaaatttatgcgcaccattggatttggcggctgcgacagtgatctggaaatggataagatcatgcgtaagcttgcaaagacagcatcaaaaacagctgtattagaaagaaatgaccatcccacactttatgatctgcgggcggaactggcaccgggaatgggaattgccatgatcgggcagatgacagaaaaagggacttttaagcgggaatatgcgttcccttatgtaactggcagtgatatttcatctactgctgaatgctccatccagcgccatgcggagcgggaaacatatgccggtcttttagatgaataccgcgtaggcatttcccttatcttttatatgaccaattccattgaatacaggagccgccgcagtaagcgtcttccagtgctggcaaaaaatatctgcctctccggacttgcttcccagggaaagatcctgctgccggtaaaaaagactcccaaacaggcggaagacttgaaacaggctgccagaaagcgtggaagcctcttagaagccgcacgccggggcgatgaacaagccattgaaacactgaccgtagaggatatcgacctgtattccatggtcaccaagcgcattataaaagaggatatgtactccattatcgagacctgcttcatgccaagcggtatcgaatgtgaccagtattccattatcggaaatatcttaagcgtcaatctggtggcaaatgatctcacaaacgaagagatctaccgcctgcgtatagaatgcaatgatatgatctttacaattgccattaacaaagccgatctcttaggcgaaccggcaccaggcagacgttttaaaggtcagatctggatgcagggaattgctgatttcggtgtcaatgatatgttgtattaaacttaaaataccctcgcaaccgcgggggtattttgcactttctatttctcccagaaagctgcaagcagctctccaatcgctttcttttcatctacttccactgcaaactccacagtctctgcttcaaatggatgttctctcatatctgtaacgatcattcccctgcaatactggccttcgcactctactctggctttgcgggtctgtgtcagtaccagtcccggtacagaggcacacatgacagctaaaggatcatgaagagggctgtcatccatacagtagtttctgtcctggtttcccatgaaataccattcaaaggcctttccaagatactctgcagcccgctttaactccggtctgcaatgtgtctggatccagtccagataggcgcgtttaaagcgcatcttcatggtcacgtccagtccaacagctgtgatcttcattccagactggaaaacatagtcagctgccaccgggtcacaggctacatttgcctctgccaccggtgatacatttccacgcatggaaagtgttccacccatcatgtacatatgttttaccagttttacaaactggggatattttttaatggttcttgcaatgttggtaagaggtcctactgtgatcaggaccatttctccctgtaaacgttctgcggtttccagatagaattcttcaattcctttatcgaatggcttacgctcactttttggaagttctacatttccaagtccgttttctccatggataatagacacgcgcccggcccattttcctgtaagaggttcattggcaccgataactaccgggatatccggcgcatttaccagatccaggatcttcatggtattttctgctgccagccatgactccacatttccgtaaacacagccaatgccctgtatctcataagcgggtctgtttaatgcgtagataagcgcaagggagtcatctacgcctgtatccatatcaaaaacgactttcattaagctacctccaatgcacaccggatcatggtgtccagatttttctctctttcctcatttgtaagggctttgctgctgtggatgctgcttcctacagtcagcatggtgagcgctttctttcctgctctggctgcggtacagtataaggacatagtctccatttcctgtgccagaacgcccattttctcccactggcccttttcgcctgccagatcctcataaaatacatcggaactgtatacatttcccacatagaaaggcgcttccatgattcttgcctggttgaccgctgactctaacagaccgtaatcagccagaggtgcaaatattcccggcagatgatactgggaagcaaaattggaattgctgcagcagcccatagccaagatcaggcttcctacttccacatcacggtttacagccccgcaggtgcccacgcggatgatctgattcacgccaaaggtattaaacagttcgtaggaatagatgcccatagacgggatacccattccgcttccctgtactgaaactttctttccattgtaataaccggtatatccgttcatcccacgcacctggctgtagcagatcacatcggtcagatagtgttctgcaatgtattttgcgcgcataggatctcctggcataagaacggtctttgcgatctggccctcttctgcctctatatgaaatgtcttcattttttactgctccaatctgtttttatgtatatgtcccttatctttgggctcatacctatccgttggggcagttttattttctggtcaaattccccaacgatgattaatgtttttgaatgtttcggtcatttctgcggttaatatgcagttcatgctggtccggggtaaagaacagtttctgggaaaggaccggggtatcatattcggaataaagctcttcttccagaattaaaaatggctctccttccgggatatttaaaatacctgccagacgctctctggcatttcccagacgcagctttgtatcgctgtaaaggccgccggaagtcagcagtttggaataaaactggtatactgtatccggattctctaaatctacactgctcttgtctaatacctcatatggcatatataccatggcaaaaccaacgactgtatcaccgctgtagtatgtaatattgatcacagccacaatgctggaagcccgaagcttcaatacctcctggtgcttctgtgtggccggctggaagcctacggtggtctctaccttatctactggctgcaggcagaaatccaccagcggattttcgatcttttccagtcctgcttttgccggacgctgggcggaaagtacaatatttcctcttccctgctgattgacgataaacccgtcttcctgaagaaggagcatagcctgacgcagtgttcccctactgacatttaactgttctgccagtatattttcgcctggaagcttatctcccggcttatattttccctcttttaaccattcgctgatggtctcataaacagttacatacagggggatctttacatttttttctttaataacgttctctttcactggcggtttagctcctttatgtctaattcatgttcatatctgcaattataactaagtatagaactaatccaccagtttgccaagtacttccggtcccttcacacgctttccaactactaccaggaccactaatgttaccacatatggcagcatctgtacgaactgggacgggatcgcctgaccggtaagatagaacctggctgcctgtgctaccgcgaataccattcctgcgcctaaggagccaagtggctgccagccgccgaaaatatttgccgcaagacccatgaaaccgcggcctgcaaccatgtcgataacgaacaggttattctgggaaatggacagataggaaccgcccagtcctgcaatggcgcctgctgtcatcattgccacataacggtaacggtttacgtccacaccggctgtctgcactgcaaatggctgatcgccgatggcacggtaacgcagaccatattttgtcttgtaaaataccacccacacgcccaaagtaataagcagtgtcaggtacagataaggagactgttcagagaaaaatgctcctaaaacaggcactttacacaatcccggaacagtaatgttagagatagacggtacagaaccgctcattccctctgtattccagattgcctttaacataacggctgtaatgccgcttgcaaacaggtttacaccgacaccaactacagactgctgggctttccatttcagacagaacaggccatagatccagcccattactgcacctaaaacaacggaaatcacagctcctgccagtgcagaaccagtaaaataagaaccaacggcaccggcaaaggaaccgatgagcatcatgccttcaacgcccagcataactacgccgccgcgctctgcaatggtgccgcataaagcacctaaaataatgggaacagataactgcaatgtaagggcaagaaaattattgatcattcccatgttaacccctcctctttctgctccagcggatcagctcaggagcagctacaaacaagatgaccagactctggatcaccgttaccatgttagtggaaacagcggtttcacggctcatacgcagggaacccatttccaggacaccaaaaagtaaagacgttaaaagaacacctgccgggtggttctttccaagaatggcaaccgcaataccggtgaaaccaaaggaaggagaaaatccttcaataaaacgatgatattttccgaagatctctgtaacaccggctaaggcagcgataccgccgcttaaggtcatagccatgatcagatagaaatttacagaaatacccgctgttttcgctgcagatgcattggcacctacggctcttaactggtatcctacggatgttttccagaggaaaatgtacataagtacggctgttgctaacagtaagaacagcgcccaggtcagttgggtctttggaagcagtcttgcaaaccagatgttctccggaagcatttctgtctgtgcagtagaacccggtaccttaaacggtccgtttaccagccatgatgtaaataaagtacagacataatttaacatgatggctacaatgacttcgtttgtctggaattttgccttaaagatacccggcacacttcctactaacattccggctgcaataccggctgcgatacttacaaccaaaagaatcggcgccggaaggaaactcagtgtcagaccggtcagtgtagctgccatggcacctgcatgaagctggccttctgcaccgatatttaacataccgcagcgagaacctaaggctactgccagtccggtaaacgctaacgggatacttttacttactgtattggctactgcctgaggtgttccaagagcacctttcaacagggaagaataggcagttgccggtgactctccagccacaaggataaacaaggctccgatcacaagagccaaaacgattgctgcaagggattttcccagttctgcagcctgtttactgctgatccatttcatttgccacatcctcctgtttttttcctgccataaataaaccgatctcttctgtggtgtactgtccggccttaaactgtgcgctcatttctccttcatagagaacagcgatacggtcgcctaagttcatgacttcagacagctccgcagagataagaagaatggcttttccttcctttttcagctgaagcagtgttttgtggacacgctcaatagcaccgatatccagaccacgtaccggctgtgcaaccagcataaaggacggatcatggcttgtctcacggcctaaaatgaccttctgctgatttccgccggaaagctgtccaatgtgctggcttacgcctgcgatcttgatttcaaactgctctacctggactttggcatcctcttccagtgccttgtaatcgataaagccttttttgcagtatttgggatcttcctgataacctaacaggaagttttctgtaatagaaaaatcaggaaccatagcgtctttgtgacggtcagatgggatatagcccagtcccattgccttacgctcttttacagacaggttctggacttcttttccgttcatggaaatagttccttcttctgtctttctgtttccaacgatcatttcttccagttcctgctggccgtttccatctacaccggcaataccgaagatctctcctgcatgtacctggatgctgacagtctcctgggcgcgcttgtgcagacgcacatttttaagttccaggactaccggaccatgaggatcttctgccttggtaacaatagactcaacctgacggcctaccatctgggttgccagttctttttcgtttgtatcacaggtatcgcagttaaatacaacctttccttttcgtataacagtgatacggtcagataaagacatggtctcgtttaacttgtgggtaatgaaaataatggtttttccatttttctttaactggcggaggatcttaaacagttcctcaacctcctgaggtgtaagaacggctgttggctcgtccaggataatgatatctgcgccgcggtacagtgtttttaagatctctacacgctgcttcatacctacagaaaggttttccactttttcatccaatggaagccggaaaccgaagcgctctaccagttcttctacttttttgcggctttcttttctgtttaataaaaatccgccggactcttttcctaaaataatattttctaaaacagtcagctggttcaccagcataaagtgctggtggaccatgccgatccctaaagcataagcatcatttggatttgtgaccgatgccttcttttcattaatatagatctctcctgcatccgggtgataaaggccgaacaggatgttcatcagggtacttttaccagtaccattttcacccagcagacagtggatctcctgctgctttacgatcaggtcgataccgtcatttgcccgcaccggcccgaaacattttacgatccccatcattctgatcgcatccataaaaattaaacctcccgcaattatgcgttttgctcactttcattcatggtaacatcaccgtcaggtgacatgtgtatctcattccttattacttcagttcgtaaggtacttcgatctctccggaaataacttttgcctttaagtcatctaactgctctttgatgctgtcagaaacctggatattgctcttttcagtggtaacatcaacaccgccgtcgcttaaaccaagaacctggttctcaccggtataggtgccttcaacaacgctggtaattgcatggtatgcgcaggaatctaacttctttaacatacttgccatgatgtaatctggagcgatctcattctggtttaagtttacgccgatggctacaaagcctttttcttctgctgcctggaacatacccattcctgatgcgccggaagcatggaagatcacgtctgcgcccttttcaacgaaggtatttgcaatggtctttgcagtggtaggatcgttgaagctgcctgcatagtcgatcagaacctgcatatccgggtcaatgtactgtgcgccggcctgataacctgctgcaaagtggttgatcagtgggttgtctacgccgccgatgaagccgatcactttaccgtcgtttaatttatcgtcgattttttcctgctttgctaaaacagccagagcgcctgctaagaatgcgccttcctgctctttacaggaataagaagctacattgtctaaatcggagtttgcgtctaagagagcgaatttctgatctggataagtagttgctacgttggtcagagcatctacctgttcagcgcctacgcagatgatcaggtcatattcgccggaagaagccatttcgtcctggatgatctcttcgtcagatacggattttggctcaacttcatcgtaggtgatgccgtaatcatcagcagccttcttaacgccctctaaagccaggtcgttgaaggagttgccgcttaaaccagcctcagtaaagatgatgcctacgtgaatgtcgcttccgtctgctgcttctgccttgctttcgccttctgcctcgactttggtctctgcgtttgctgctgtagtgctctctgtcttagaagagccgcatcctgttaaagatgctgctgccatacatcctgccagtccgaaagctgccgcacgtctcatggttgctttggtgaaaatgttctttctcattgttttttgtcctccctttggatcattaaaaataataaattctacatgtttttcattctatctgtacatgtatatcaagttgttcaacaagttgtttcaaatgtagcatatttaataatacttgtaaatatgtggttgacaagcttttatattttcgttaatcctatacaatttatctgcattgtttttgtgcaactttaattatcattttgggaaaattacccagaaatacaaaggacttgcatttttcatggaaaaagggtagaatatttaaagattgtgtttctgtagctcagtaggatagagcgttcgcctcctaaggttatgctctaccggccgccttacgatgaaaagtgatcgttgccagtctcaatttaatataagtctctgtagctcagcaggatagagcgttcgcctcctaagcgaaaggccgtgggttcgaatcccgccagggacgccagcaaacacgccgaaaacctttgatttatcagggttttcggcttttcttatttctgcggcttttgtggcttttttgcaaaaaaccttggtttgctaacatttgctaacgagatttggccttttgctaagaaaggcggtaagtcagaggttcgatttttaccaaaggaacttgcaaacatttgttagcagaaattagaggaagttgcaaacaaaatcgcgaatttgctaacatcgctcaaaaatgctttcagaaccttgctaacaaaaaaagtgtttggtc

SEQ ID NO: 3531 - DNA, 36662 bp, Unknown
  gut microbiota DNA sequence
gtatgtcatgggccattcggatgcacagatcacaatgaatgtctacaatcatattgcagagaagtctcatgttgagaatgagatgtctaaaatgaacctgccagaaaccgtacctgttgtggtataaaccataagttgttgtcgtaaaatgtggtaagaaaatcagacgaatatatttttccaagaatttgtcgtaaaaatgtggtcaaatcaagaaaatcgagtgcgaaagcaagtgaaaaatccctgtgaagtccgtaaaatcaaggcttcacaaaatcttcacaaaataattagcactcgcctattgacattgctaataataagtgttatattacagctagaacaaaggaagggaaacagaaaggaacaaagaggcaaagaagtaagatgccaaaggttccaggaagtttccagacatccccggttccagaagataacaagtaaaataaaacatagagagtataggaaaaggagagatgacttatgttaatgcctagtatttttggagaagatttatttgataactttatgaaggattttccatttttcgatgataacacagaaagcaatgtagaaaagaagctgtacggccgcagaggtaaaaacctgatgaagactgatatcaaggaaaccgaaggcggttatgagctggaaatggatctgcctggatttacaaaagatgagatcaaggtatccctggagaatggttatatgaccatcagtgcagccaagggacttgataaagacgaacaggataagaaatctggccgttacatccgtaaagagcgttacgcaggatcctgtgagagaagcttctatgtaggcgaagacatcacagaagaagatatcaagggtgagttcaaacatggtatcctgaagctgttcgttccgaagaaggaagcaaagccggcagtagagcagaagaagtatgtttctattgaaggttaatatgaaacagggagcgggagctggtcaactaaataaggtcataaggttataaataagagccgccggaagaagtgtaaaagctttttccggcggctttttgctgcaccggcagctgtaaaagggccgacagctccgccagacaaataaaagcatatgcagaaggaaaattagactataacccggatgtgcactgcactcatcatgagcatggagcgggacattcctgcggagaacatcactgtggggaacatcagtgttaggataaataaaagcgggatttattttttcggtaataccaccataaagcagcttccgcagccttttacactttccacagaaatatttccaccatgtgccagcacaatggcttttacaatggtcagaccaatacctgcgccgccggttttgcggttgcgggaacggtcggtacggtagaagcgttcaaagatcagaggaatgtcttctttagcgataccgatgccctgatctttgacggtcagctgcacgtttttgcctgaattgtggatatctatcaggatctgaccgctttcggtagaatatttaacagcattggataccaggttgaagatcacctggtggagccgtctctggtctccggagataatagcagactcacctgttaccatgcaggtgagtttcttttttgccagttccggttcaaaagcagtttttactgcctgagccaattctaaaaggtcaactggttctttctccagaaccatattggaagcctcgatctggcgcagtttttccaggtcagaaatgataccggagatccggccgagttcatcatagcagctttgaagccgctcttttgttggttcccagacttcctcgatcatggcttctaactgggaagacacatttgccaccggggtgcgaagttcatgggctacatcggaggtcagctgtctgcggacgtcttcctgtttttcaagattttcagccatatggtcaatagcctggccaagctgggccagttctaaggctgcggtattggttttatctgctccgtatcgaatctgataatttccatcagcaatcttttcggccgtttcttttgcctttgtaagaggaacagaaagccgttttgcaaggagcataccggcaatcactgcaaggataagagaagaaataccggtgataaacaggatctggtttaaagagtccagaaactggaagtcactttcactgaaataataagggccgtagtagctgatgtctgcataaccggcaattttattgtcctggcttaatgtatagtgataagtggaaaaactgcccttaaggccgggccgcttcttctccatatttgtatggatgtctttcatgatctggtggcatagggttatgtcatgattttcggcatcccagatgatatttttatctttgtcatacactttgatgatatatccgtcttttaaagcatacattcccacaccatggatataatccaggttccaggtctggttgctgctgttatactgggacagaagtgtggtgatcagctgttcggcaaaggtctccctctgtctggctacatatttctcaaactgatggctgatcagcagattggcagtgagactgatcacggaaatagtgatcaggacgattactgcaaatccggcagataattgtgtgcttatcttgtgtttcttatgtttcattatatatttcccccgaacttgtatccaattccatgaactgtacacagataaatgggatttttggggtcatcttctattttctttctcagatttttaatgtgggtgtcaatcacccggtcatatccggaaaaatccgtgtcgaaagcggaagcaatcagttcgtctcttgtaaatactttttgaggatatctggtaaatgcagataagatcttccattcaatgggggtaagtgaaatagtttcccctttttttaacacttctttccggttatagtcgatcaccagatccccggcattccatgaaaatttttctgcaagaggcttcaggtcatggtctgacctgcgccatactgcctggatcctggcatacaggtttttcaggctgaaaggcttggtgatataatcgtctgctccaaggtttaaaccatttaacatatcatcttccatggttttggctgtgagcatgataatgggaatccgggactgcctgcgtattctggaacagatttcttcaccggatatatctggaagcatcaggtccaggattacaaaggaaaccgtttctttttccagaaggctgagtgcctgcgttcctgtttctgcctggagcacatgatatccctgcttttcaagataggaggcaacggcctcacgcatcatgttttcatcatcgacgatcagtatcgttttctgttccatcatatcaatcatccattccttcttaaacatcctcattacaagttttcgccatacaattccagatgtttttagcttccgcagcagcccataccggagccgttaaaaaatggttctgtttcaggatctgtttcttccgctcctgtacttgtatctggatcagttggagaagtttctagtgtatctgttacagtgatattaccacgtatcattcccatccagcaagtatattgaaaagttccggatttagaaggagtaaattcgatcacattttctccttctgaaagggtatgttcaattccgaaggagcgcagcaacattctgtagttgcagccgttaagggagcctttgggagcattgatgatccattttataggaacaccggtctgaactttgatatcaggatatcttccgcgctgtaaggtgctgtagatgacctggatgttatttgcattttcatcctggggtgttttatcggcagcattggaagaatctgtggtatctgtcgaggttccctgatcttcggaagttcccgtattttgaggatttgctgtattttgagaattttccgggccttcggaaataccggctaatgcagttccctgggaaaacatggcaagaccgaggacaactacaaggatggcgccaacagtggtcattttttttgcaaaacgctttccaagaacggagaccagagagccaagccaaagcataaggggaacggttccaagactgaataaaaacatggataaagcaccggaaaatggattttggcaggccagagccacaatctgcatggactgaaggggaccgcagggcatcaggccgtttaaaagtccaacaaacagtggctgtcggctggaagcacgctttttaaggacttttgtggataaaaaacgtgggatccgtaaggtaagtggacgaagccagggaaagatccccagcatattgatgcccatgatcaccataaaaattccggcgatcatttttaagctaccctggagaaaataggaaatcccggtctgtgtaccggcgcctaacagcatgccaacaagacctaaaagaaaaccaatcgctgtataagaaatcacacggcctgtattataaagaagagccggaagaaaaatgtcaagagcgcggctgcttccggaaacatcagaggcatttgaaggttgtggaatacattgggacaggttgatgccgccgcacatggcaatacagtgtacagatgtaataagtccgatcacaaacagcatgccatagcccatttttgtatctgccagctgccctggtgccagcaggttgagaatgccgaaatgctgtaaaagggcatataaaaacaggataacagccagtgagacaaagttttttttcatatcataatcggatgttcctgtttccggcaaaatggtatagccgtttttttcaatgatctcccggatctgttttaaggaaatggtatcggtatcgtaagtaacatgggcaaggccggtattgtagcttacagtagcgtcctggatcccgggtgcggttttcaggacgtaccggatcctgtgttcacagtttacacagctcatgccgccgatatgcagtgtttttctgaggatcttcataaacattgtacctctctttactttcattgtttttgtgagtataccagagaaatttgtgatttttatgtggaacagacattttgtgcaattgttctgctatagtcttcttttataactggcaatagaaaatcacatgttgacaaaaatgttcatcatctctataatacccattaacataccgatgtgattggttaataaaaggtgaggagaaagcatatgagtgacaagaaagaaaaagatagcaaggtaaaaagcagtaaggctaagaaaaatgtggaaaaaactcaggaagtgtcagtaagtgcagagaaaaagatatttccccacagctgtacggactgtggtgtgcttaactgttccaagcggaacgcttcttatccggaattttgtcttacagaaaaactgactgaaaaagaattagaaaaagtagttaagctttatacagaaaatgaagaaaacaataagatagccattgcttcagctgaagtggaaggtggcttttatggaaaatatacccgtgtagaggagatcatggaagtagcgaaaaggatcggtgcaaagaagatcggcatcgcaacctgcgtaggcctgatcgaagagagccgtattttcgcaaggatactgaaattaaatgggtttgacgtatacggagtggcatgtaaagtaggttctgtagataaaacagatattggtctggatcccaaatatacatgtaagaccggaccggtgatgtgtaatcctattttacaggcaaagcttttaaataaagcggggacccagttaaatgtagtagtggggctttgtgtaggccatgacagtttattttataaatattccaaggctctggcaactacgctggtcacaaaggaccgtgttctggcccacaatccggtaggtgcgctgtatcagacaagagcttattataagcggcttttacagcagcccttatgggatgatgaggatgacaaaaaagaagagaaataacagattagataggttggaaaaagtgagaacagaatagatgagatcatgaaagatcaggaggcagcaattatgagaggaaaatggaagtcaggcatcagaatatttgcaggagctgtacttgcggcagcagttttggctggctgcagcagcaaaacagcagagagtggggcagctcaggatgcaggacagaatacagcccagggaaattcagacagccaggaagtaagaaaagtctatgtggcagtaggcgctacctttgaaccatatacatacatagatgaaaataaccagcctgcaggctatgatgtggctgttttacaggagatcgacaaccgccttccacagtatgaattccagattgaaaacatggaacttgccaacatttctgttgctctggatgcaaagaaggtttccattggctcccagcagtttgagaagaacccggaaagagagaagaagtatctgtttacaaatgaaggttttgccgcttacaataagcgtcttgtatacaaaaaaggaagagatgatatccactctattgatgatctggttggaaagaaagtaagtgccggtcagggaagcaacacagcagcgattctggaaacatacaatgcagaacatgacaataaaatcgatattgtatattccaatggtgctaccaatgaaagtatttatgatgatgtaatgaacggaagactggatgccattgttgcaaccaagaagacatttaaaaaatacaatgaagcatttggcggtggctatgatattaacgaagacagctatttcagcgagtcacaggcctatttcatgctggcacagggagaggaacagctccgggatgacatggatactgctttaaagtcaatgaaagaagacggaactcttacaaagctttctattgagtacacaggaagtgattataactcagaagaataaatttacggtacacgtattttatgaatgatcttataacatgaacagtaacagaacaggagcataaaacatggatctttccagcattttccgtttcagcgatatggtggaatatttcccaaagatcttatcccgtttccctgtaacgcttcttattgtagtagtgagcgttgcaggggggctggtcctgggatttattctggcagcggcacgtatctttaaaataccagtgttaaaagaactggcagctctttatatctcttttgtaagaggtaccccgatcctggtgcagctatttgtagtctattatggactgccacttcttgtagcacccttaggagtggatattaaccattggagtaagctgttttttgtactggttacatatcttttaaatgatggggcatttatgtcggagatcatccggtcttctattgaaagtgttcccaagggccagcttgaagcggcagcttctgtaggacttaccacatttcagacctataaaaggatcattatcccacaggcatttaaaatagcagcgcctgcatttggaacccgtgtggtcggatctttccaggcaactgcaatggcatttacactgggaattattgatatcatgggtcaggtaaaagctattggaacacgtaccaaccgtgttctggaaggctatgtagatgcagcgatcatatttatcatcgtttcctatttactggagcgtttgtttacctggatggagcaccggcttaatggtcagacaaggaggaaggaaaatggcatcgccctttgagttttcgtatgtttttacagtgatcgggaaaatatgggaagctatgccggttactttgctgctgacttttgctcccctgtttataggtttcctttttggtgttccctttgcggtgatccgccgcttcaatgttccttttgcagcttcgtttttaaaaaatgcgtctaatattttaaaaggaataccggcggtactgctggtgcttatgatcaattacctgatcttaaagcctattgattacctggcgttaagctatgagtgggcaaagccgctgcagactatgaataaaatatatataggtattgctgcgttaagcatttatgcagtggtgcagatcacagaaacagttcttggcgctctcctttccgtgggaaaaggacagtatgaagctgcgtattccataggacttaccaggacaaagacattgtttcgggtggtctttccacaggctgttcctgcagcccttcctgttctgtgcaacaatgtgatcggtcttttaaagtccacatccattgtatatcttatttctgtaaatgatattttaggagcggccatcaattcggcagctgtgaatttccgttatctggaggcatatattgcagtggctgtcgtatactgggctatgtgcgtctgcgtggaaaagctgttttatgtaatggaaaaacggtataaatatgcggcaggaggtaagatatgatcgagattaaaaatttacataaagcatttggacagaaccaggttttaaaaggtgttgatattactgtaaataaaggagatgtggtggtagtgatcggccccagcggctccggaaagaccaccatgctgcggtgcattaatttcctggaaagagcagatgaaggaacgatcacagtaggagatattacagtagacgcagcaaaagcaaagaagaaagaaatccatgagatccgtttaaggactgccatggttttccagaattataatctgtttgccaataaaacggcccttggaaatgtaatggaaggactgacccaggcaagaggcgtatcaaaagaaaaggcaaaggagatcgctcttgatgcattggaaaaggtaggtcttaaggataaggcagattattatccgtcccagctttccggcggacagcagcagagaatgggaattgccagagctgttgtgttaaatccggatgtgatcctttttgacgaacctacgtctgccctggatccggagctggtgggagaagtattaaaagttatcaaagatattgcaaaagaagggatcaccatgatcatagtgacccatgaaatgagctttgcttctgatgcagccaatcgtgtgatctttatggccggtggtgttgtagtggaagaaggaaagccggatgagatcttttccaatccaaaagaagaaagaacaaagcagttcttagagcgtgtactgcctaagtggtcgtatacgatataatgagcgcagagaaaaacaagcgccgcccgaggcggcatttgtttttcgcaagccattaacgaacaagccgcctgcgtcagcaggcagtggagcgcaccagcgcggggcttgtgagtttaaggagtccaaaagaaaaacaagcggctgcgaaaggagtcccccaaatgaaaattgattttaacagacagataaacagaaaaaatacagactgctctaaatgggacggccagggaggagattatatcccgctgtgggttgcggatatggactttcctgtggcagagcctgttttagaagcactgaaaaaacgcctggaacatccatttttcggatatacatttcccggagaaagtgtttatcaggcagttatttcctattataagagaagatatgattttgatgtaaaaaaagaatggatcctgtttaaccatggagttaatacaggaaataatattgctgccagagctttaggcggcaccattatggtggcaactcctatgtatccccatattaaccagaaattgccccaggaagcgggaaagccggtgatccgtgtacctttaaaacaggaaaacgggctgtatacctttgattttgaggcaatggaaaaagcggttacacaggatgtgaccacctttgtgctgtgtaatcctcataatccggtaggtcgtgtatttaccggaaaggaacttgaggagttatttgcatttgctgccagacatgacattgtggtggttgcagatgagatacacagtgacctgatcctggaaggagaacatattcctgcgattaccttaaatgaagcagccagacagagagtgatccttcatcattctgcaagcaagacctataacatacccggtcttccggtggcatttgccattatcccaaatgaaaagttaagacataaatacgaagaagtagcagcaacgatgcatgcgccttttgatactctttcttttgttgcccttgaggcagcttttacaaaaggggaagaatggcggcaggaactgttagaatacctgagggaaaataaaaaatggctggacgaacggatcagccggatcccggggctttctatctgccacagtgaaggtacttatttaggttggatcgatgccagagaaaccggattaagtgatcctgccggcttttttatgaaagaagcaggtgtgaaatttaatgacggagagtctttttctgctcccggttttatccgtgtgaatttcgcctgccccagagcgtatctggaggaggcgtttgataaagttgagaaagctttggataattggaaaaaacaggaaaaagtttattaaaagtttgggctgctgttgggcggcagaatggagttttttatgaagataacaaaagttgatatttacatgctggatgctactgcccagagagccagcagacgtcccatctgctgccgggtatggacagatgaaggtttctatggtgacggtgaagcggggatcgcttttgattacgcagcacctgcggggatcggcatgctccaggatatctcccgtctggtcatcggaaaagatcctatgcgtacagatgagctgtgggagagaatgtttaaagtaagcttctggggccagggcggcggcccggttgtctttgcagctatcagcgccattgacattgccttaatggatatcaagggaaaagtattaaatgttcctgtttatgaattattaggcggaaaggtaaatgacagcatccgctgctatgcgtcacagcttcagtttggctggaatgaagatgtagggccaagaggtaccgcaaaagaatacgcagatatctgtaaatatgcaatggaagacggatatgatgcggtaaagctggattttactctttatgaccgggataagaaagatattccaaaccgtgactgtgaaggttttgtctctactgatttttataatatggtagaagaacgtattgttgcgatccgcgaagcctgcggcaatgttgatattatcatggaaaatcatgggcgtaccgatgttacttccggtattaaattaggagagctttgcgataaatataatttttacgccttagaagagccctgtacgcccctccgcccggaattccagaagctgatccgtgaaaaggtccgcactcctttggcatctggggaacgtttatataccagatggcagttccttaattactttaaagataactctatccagttagttcagccggatgcctgcaactgcggcggtatttcagagtgcagaaagatctgtaccatggcagaagcttttgacgtaaaggcgcagatccactgtgcaggcggtccaatttccacagcagctgctttacagctgacagccgctactaccaattttgcgatttatgaacatcattttcgttccacacagcctgctattgcccgtcttggcaagtatgattatcagcctgtaaatggaaaattctatgtatcagacagaccgggtatcggacaggaactttcagaagcagccattgcagaggcacttgttcatgtaaccgttgatgaaccataaacggagaggagaactatactgtgaagaaaaaaatacagatcccccacatttttgttatactggtatgaattgctatgttctttgctgtactttcgtggattatgcctgcaggagcttatgaccgggtattagatcccaatacaggaagaaatattgttgatcctaacagctttcattatcttccaaaaaccccgattacatttatccagtttatatctgcttactctggaggttttaccaatgctgccagcatgatctttatgactcttgtagtaggtggaaccttcggcattatcaatgaacttggcattatcccggctgctcttgccatcatccttaaaaaatttgataagaaccgggaaatggcgatcccgttcctcattcttgtttttggactttttgagtcctttatgggggctccggagctttgtatcatcttccttcccatgatactgccgctggtactggatcttggttttgataccatgactgcccttgctatcgttatctgcggaaactgcgttggctatagtacgggtatgggaaatccgtttactactattatcggccagaaaatctgccagcttcctctttattctgctatgtggtatcgtgccatctgcttcttccttttttacgggatcactgtatggtatattttaagatatgcgaagaaaatacgcaaaaatcctatactcagtgctacctacgaagaagatgagatacgcagaaaagagaatatgcagatgactcagaatgcaactttaagcgctaaaaacaaagtggtatgtgtctatgttgttgtctgctttttctttaatattttcggtgtgatcaagcttggctgggatattgctgaaatgacaggtctgttcctggtaatgagtacaggtgccggcgttctctccggccacagtcttactgatacctgtaaaatgttcatgaatggtgcaagagatattcttcagggagcccttgttatgtgttttgcacgtaccattgcccttcttatgacaaccagcaatacacttgacgtatttgtttatggaatttcaaagattgcaggcgcttttcctcctactctggctattgtgggtatctttattgccggcatgctgcttaatttcccgatcaacagcggttccggccagatgacagctaccatgcctatcatgtctccactggcagatatccttcatgtttccaagcagggcgctgtccttgccacacagtttggtgatggctggtccaatactatttatcctaccaatgcttcttacatggcaacgatggcagttgccaaagtaaactgggtagactggctgaaattccagtttccactgcattgtatctggactgttgtaagtgtcattatgctgatcattgcccagacaattaatataggaccgttttaaaatctgctggacaatccttagcccatcccttaaaatgaaagcagtatgagatttttggtttgacggaaattaaaggagcttaggatgagggaagaagacgtactgcaggttttaggtggaagtttctttaatagtgtcctggtggatatagaaaagaatacatatacgcggatgaattttgcaccatggttgttaaaaatcagtcagactggtatgtataccgggctggctgattttattgtctgtaattctgcagtggaagagtataaggagagtttaaagaaagatctgtctctggaaagcatagaaacattttttaacagccgagatccggaagaacgggatgaagagaacagtatcacctatgaggcagaggtagacgggaagagaatattgtagatatgatgggcggaaatataaaggtgaaaagtgagctgggaaaaggctctgagatcactattggcttgcgttttaagactacttctgcaacaaagaaccggggcgtgatccaggaattaaacggttttcgggcactggtggcagatgataatatggacagctgcgtcagcgtggaaaagatgttgcggacgatcgggttgcggcctgagtggacgacttccggaaaggaggcagttttcagggcaaaatatgctactgagcagaatgatccgttccatgtatacattattgactggctgatgccggatatgaatggcgtggaggtagtacgacggatccgaagtgagattggagatgaggtgcccatcattattctgactgcttatgactggtcggatattgaggatgaggcaagagaagcaggtgttacggcattttgtgccaagccgttgtttttatcggaactttatgatgtgctgcaaaattccagcaaggcaggcggtattggcggaaatgagatcattgcgccggatacttttaagggcaggaaggtacttctggtagaagatgtggaactgaaccgtgagatcgcagaaaccatcttgcaggaagcaggcatccatgtggtctgtgtgggaaacggacagaaggcggtagaatatatgagtcagccggaggcagatgatattgatcttattttaatggatatcatgatgccggtaatggatgggtatgaggctgcaagaaggatccggaaactggcggatccggtccatgccaataaaccgatcattgctatgacagccaatgcttttgaggaagatgtgaaagcagctctggcggctgggatgaatgaacatttatctaagcccatccgtattgagctgctgtatgaaattatgaagaaatacttatgatgtttttagaaaagtagttcaatgatatgacgggcagttgcctgtggggtgcggtcattttttactgtaaatgctgcgtaagcctcataggagactgcccgcttgttgtatcggtcaagaagttcttctttggtgttgtttttgataagaggccggtcaggatttcgcatcaggcttttgtagcagtcttcaaaggggcggtttaagtagataatggtaccggctttggagagaagatcgccgttgcgggagtaggtgagcagaccgccacctgtggaaattacgcaggggggatagctggatacctgtttggtgatctcatgttcaatattgcggaaggcttcgttgccttgagaggcgaagatctgttgtggagtctgtcctgtctgggaggtgatcagttcgtctgtatcgtaaaatggtacgtcaagctggcgggccagttcttttcctatggtagtttttccgctgttggtgtagccgcagaggaaaatgggttttgtcagttttgtgggcattttttaaggatcctcctgtgggtataaaaaattactttgaggttgtatacagcaaaaatgataccatgtttcaggaaagaatacaaggaatatgacaacagtgagtaaaagctttaaagttttaacttggcaaagtttattgttgaaacctgtcacctgctgtgttataatctgcattagcacagcggagattacgagagtatattattttacagaaagaggagtgtagtattatgaaactgaaaaaatgggtcgcactggctacagctgctgcaatgtgcctgtctatgacagcatgcagtgtttctgtatccacaaatgagacaacaaaagcagctgagccatcagcagaaaccaccgcagcagaggcaggggacaaggaagagtccggcgaagcagctgagtctgcagcagagggagatttagtagcaactgctgattatcctaccaagcctattactatgatcatcccttacgcagcaggcggaactacggatgtatggggcagaaagttagcagctctgttagagaagtatttaggacaggctattacagttaccaaccagggtggtgcttctggttctatcggttctcagtttgtaaaggaacagccttctgatggttatactgtattagtttgtgcagagaccatgggaacctatcgcactatgaatgtctgcgatctggattattctgattttactgttatttctccattagtaggagatcctaaggtactggttgttggtaaagactccaagtacaacactctggaagagttactggatgatattaaggcaaatcctggaaagatcactatgtctcactctggtcctggcggaagcggacacaaccagggtcttgttatgaaggagcttggttatgatgtggctatgaccagttttgactccggtaatgatgctctgttaggcgtaattggtggacaggttgattttactaaccctaatatctctactttaggcggctatattgaaagtggcgatgttaagcctttagctgttttctctgataagagaatggaagcttatcctgacattcctgcatttactgagtctgtaccggaagctgagaagtatttaaatattccttatactctgttaagctttgttgttaataatgatactccacaggatgtggttgatgtattaaaggcagcatcccagaaggtatttgctgatcctgagtggactgattttgttaagcagaaagcagctgatcctgtttatgaagagtatacagatgatgcttctatccagaagttctatgataactggaagtctgttatctgctggttacagtatgacaacggcgtagctgagaagagccctgaggattttggtattgcaagagttgcagagtgatagttacagttcagcatatggtggaactgtaatctggaaatgttgagagttaattgaggattgatcaatgaaaaacaaagtttcttcactgattgcagagggtatcttattttgcgggagcggcattttgctgctctcgtattctcttatatcctatgcaaaggcgtttaataaatcttggagccagtctccgtatctttttccggcattggttggtgcagcactgatcgggctttctatctggatcatgggacagggagttctggctatgaagagagccgggaatggaattactttgaaagaaaagacagatagtaagggaaagatggcaagagttttgggagtgctggtgctttgtggactttattatctggttctgggagcggtttcaattccgcgggttacgatcggaatcttgagttttagtattacgatctctatttttgaggttgctacggttatttttctgatcgctatgatgtggtttatgaaggtgagaaaagtggctgtgcttgtacttgttcctattgggacatcattgtttttgagtattgcatttaggacttgtttacatgtaatgctgccataagtttaaggaggaaaaacagatgttggaaatgttatcgatcgtggatctgcgctttcttcttatggtccttttgggatctgtggcaggtctttttgtaggtgctataccgggactttctgtatccatggctacagcgctgcttgtttctattacttatacctgggatcattctgacgctttggctatgatcatgggcgtttatgtggtgggtgtattctcaggtgctgtttctgctattttgatcaatattcctggtgcgccgtcttcagttgttactactttggatggttatcctatgtctaagaagggacagtcttataaggcgctttttacggctacgatctattctttcgtgggtagtgtttttggatttattgctttgggactgttggctgagccggttgcggcgattgctattaagtttacgaaaatggattatttcctgttggctttgtttggactggtgacagttggatctgtcagcacgaagaattatgcaaagggattggtcagcgttatgctgggactgatcatcagcatggtgggacttgatccgttaatgggtacgaagagacttactttggggatccagaatttagcaggtggtatcagtacggtaccggcgctggttggcttttttggatttgctgaggtgttgagtgttatttatagtcttggtcaggaacagaatgttctggctatggagaagacgaaggttagtttgaaggaagtgcttaaacattggaagctgtctatttatacttcgactattggtatgctggttggtgcgcttcctggtgccggtggtccggtggcttcgtttattgcttataatgaggcgaagcgtattgtgaaggaaccggaggtgccatttggtgaaggtgctatggaaggtattatggccagtgagtcttctaataatgcatgtattggtggtgcgcttattccaatgctgacgctggctgtgcctggtgatgcggttactgcgatcattttgtctgtattctatgttcatggactgcagccgggacctatgtttatcaggaaaaatccggaggcgtttcaggctattttgatcgcggggattattgcttgcttcgcgctgttggtacttggattgttggtagcgccgaggatcagtaaggtgatcacgataccgaagaatgtgatgatcccggttgtgaccagtctttgtgtgatcggatcttttgcatgtaataaccggttgtttgatgtggctttgatgttcttgtttggagtgatcggatttttgatgagaaggtttgattatccggttgcaccgctgatcctggctatggttttgggacagatgatggattctaactttagacaggcggtatcattggcttcttctgcagatcatccgattttgtttacgtttgggcattggcagacggtgttgctgctgctttgtattgcctgggtgcttttgggaaatattccttggacgaagccttatgtggagaaggttagaggggtgtttcgtaggaaatagggcacatattcgaaagaaaagaggatgaggtacataagcgcatcccggcgaaaaaagacctgttttgctccgtcgctttttgtcaggtctgtgatacaaactcacatgctacgcatgttcagacagtgtatcacagacctgacgctatactcacaaaacaggtcttttttctgaaatggatgcttctcatgtacctcatcctcttttcagctagggtgttgccaacctctcggacgcagtccgggaggttttttgatggaaattttatttgtctttaggcatggttttaaagaattttacgaccatcggaagtgtgatagaagcggatatgatatcagagatggtctgggatatctgaattccggtgagtccaaggatagtgttcatgatacagaggacgggaatgaaaatgagtccgcttctgatcatggacaggaaggtagcacggccattctttccaatgctctggaagagcatgtttccatagagggaaagtggcatgaagaagagggcgatgcactggatacgcagggcgggaataccgatggcaaggactgccgggtcatcacggaacatgcgcacgatgggggcagagcaggttattccgataaaggcggaaatgctcattactacgaagctgctttttacgctgaaccagaaagcattacggacacgtttgtattttcctgcgccgtagttgaaggcgctgactggctggaagccttgtcctatgcccagtgctacacagaagaggaagtttatgatcctggtgacaatgctcatggctgcgatagcggcatcaccgtaagggcctgcaaagcggtttaataccataacggaaacgctgttaagtccctggcgcatcaggcttggaaagccggttgccaggatgttggacacatcgctgaactgtcgggtgacgtagcggatgtttaggcggctttggacttttccgcgaaggaatgggctgatgaggatggccatgctgatgtactgggaaatagcggtggagataccagcgccacggactcccagttttaggacgaagatcaggaacatgtctccgaagatgtttaaaataccgccggaggcaagacctagcatggcaaagaaggcttttccttcgtagcggagaatgttattcataacgcagctggatgccatggctggtgctgcaataaggatccaggtgctatattcgatcgcgtgaggaaggatggagtcagtgcttccaaggagacgcatgaagggagcgtggaagagaaagccaaggatgcaaatgagggcgccacataataatgataagaagaagctggtggatgcgaatttgcgggcgctttctacgtcatgcgctcccagtttacggctgatattgctgcctgcgccatgtccgaacatgaagccgaaggcattgataatagccatcagggcgaacacgactcctgtagcaccgctgacactggttccgagctggcttacaaagaaggtatctgccatattgtatacactggtcacaagcatactcactgtggttggcagtccaagctgcagtaccagtttgttgacgggggtttttgtcattttatcatattgtatctgcgcactatctgttttcataatatgtatacctttatatataagtgtgggaaatagaataaaaggccctcctgtgatttattttatcatagaaaggccttttgaaaagcgtttttatactgttcagttaaaaaaagtttactttgtttttacatagcggtgtttatatttatttttcttccaggtcgattgcttcgaaaagatctccgagggtttccagtgctggaagcagttttgttacgccgcaggtgaagaacaggatgcggataacttcaaagatctcatcaatggtagcgccgttttccagagccagttttccatggactttcatagtggtctctgtggaggttgcaattccgactgccatgacgatcagttctctgtactttttaggaatagagatgtcttttttgttgcagtttacatattgctgatagaacatattgatcaggttcgggtcatttcccataacgcggtgggagtctaaaagttttcctccgcgggcttcttttaaagcttccaggatctctctggaacgctcaagtttagcttcgtctgtctgtttcaacgtaataccttctttcacttattattgataaacataccgcctgcgtcagcaggcagtggagcgcgttagtgcgtgttcgtgagtggataaaataaaatgggatttactgcaagctgtatttagctttcagaaaatctggggcatagcctgggaagagggcataggtgactatgtcttcttctgtgcgggcaagtgagccgacttcggctcttgctgtgtccattcctggagctaactggtcaccaggacggatgaatgccggtttttcatctccaagggccttttcaagaagggttggatcaatagggcccggtgggcgtccgtagagaccgcggcagtagtcttttaattcacggctgaccattgcgtagcggttgccggttaatacgtttgtggttgcctgggcaccgcacatctggctggatggggtggcaagaggcggatatcccatatcagcacggacacgggttgcttcttctaatacttctgggagacggtcatacagtttcatggctgtaagctggctttccaggttggagagcataccgcctgggatctgatgctggagacagccaacgtctacacctaccagtttggtgccgaaatctgcatatttgcggcgaagttcagcaaattttttgttgatatcagcgaactgtccaagatcgatcttcggatctctgctggttccctttaaagctgccaggtagctttcgattggcggaagggatggtcccatggacatagaggaaacacatacatccagtccgtctacaccggcgcggatggcttcccagtaagccatttctgccataccgcctgtgcagtggcagtgaagatgtaccgggatcttaagggcttttttcaaagcggtgatcagttcgtaggcagcttccggtgtcataagtccggccatatcttctacgtgcatcagggatgcacccatctgttcctgttctaaggcattctggacgaatacttctgttgtatggaatgggcttacattatactgaacggaaccttcgatctttttgcctgcttttttgatggctttgaatgcggtttcgcagtttctcaggtcctgaagggcatcgaaggtaaggaatacatcgattccggcttctgctgcctgtgcgatgaaggcttctactacgtcatctggatatgctttgtagccaaccaggttctggccgcggagtaccatttttaatggggttttctttacgtattttttaaaggttcttacgcgctcccatggatcgtctttcaggaaacggactgctacatcgaaggtagcgccgccccacatttccatggagtcatatccaactgcgtccatctgctctaagagcgggatcatatctgcagtggtaagacgggttgcaaaaagagactgctgtccgtcgcggaaatctacactgttgaatttaagaggagttcctgcgcctgcaaagtctgctgctccgattccggaaggagcagaaagttcaggagccttttttttgttccagaacaaaataccacacctttcatttcgtaataaggatgtcaccgcaaggtgacatgctcctttgattatttattatagttgtttgctgttgacaggtggatcaaagagaaaacctgtcggggaatgttggattttcttgattttttggagatcgttctctggtcagtttacagtacctggaaaatggcaggttccggcaggaaatcaaaaaaagaatccggaagggaccaggtactgaaagctggccagagaacggcaggtactggcagatgcaaaaggggaagtatgcatgtcagaaacctgcaaagattgaatcatgtaggatatgtaatacttaagtcaaacgttaaactaaaacgttaaaacaagaatactaaaaaagaatgaggttgtcaagagggaaaatgaaaaaacgtgaaaaagaagattacgtgttgtggaaactataacatagtaatgagataaaaagacaggagctgatatttacagctcctgcaaaaaataatagatgacgaatggattatgaaaaactctctctcagcatcagtttcgcatgtactttcacatgctctgatgatatatcattgtttaaaactttttttctcatcaggcgcagaacttgctgaccgatctctttgtttggcatttctactacactaagggatgggacatagtaggaagcagcttccggatccaacataccaatggagagaagttctgcatctcccggaacagagatcccttcttcatggaaagctcttaaggcacccagggcaatggcatcggagtcacagaagatcatttttggtggttccttaagggcagcgtattgtttgccgatctcataaccgccgtttcgtgtactggatcccttcagaatgtatttttcgtctgtttcaattcccagacgttcgcaggaacttataaatgcctggacacgctgactggtagcaaagtaggagtgtctggatgcaaagatagctgcttctgtataacctttctggcggatctttgtggctgccatcaggccgacttcgtcattatcggtgcatacagtggaaaaatgttcggactcacggttgatcagtatcactggcatacgggggcagatgccctcaagccactgctggtctttggcagagcatgcaccgataatagcgccgctgtagccattttttaagaaagtggtaccatattgttccagtttatcattttcataagtctgtatcatcatttcacagtcaaagccagattcggcaatttctatctgaatgaaatttaagaaagaagccagaatggaaacacgatagtccaatggccagaaaaatgcgatcacagggcgttcattttcctgggagcgcagacgtcttgcgcttaagtttggctgatagcctaaatcccgcattgcttcggccacccgttcctgggtagcagcggagatttttctttcttctgcttttccgtttatgataatggacacggttgtaacggatacaccggcctgttttgccacatcttttatagttgccatatattcacctttatacctttttttgtttactaaaatcaatcttaagccagattcacacattatgtcaagcaggaaagaataaggatatatcccctccataaaaaatgcacaataagtaatacgttaaactatataaaactgacaaagaatattgtatttttatcaaaacacttgacaagcgtcaaacgataaactattatttgtgacaaggatgaacgttttactaacacgttaaactaaatgagatatgtacatgttactactaaataaatgcaatacaagagatacaaagatgcacaagtacatatccgcaaaagcaaggcatttcgccggctgtccgatttctggggaagagagatctgacagagatgaaaaatgataactaattaaaaacgatcaaccccacaaagaaaggaaagtacagattatgagtaaagtaagcagagcaatggacggaaacgaagcagcagcttacgcttcctacgcttttaccgaagtagcagcgatctatccgatcacaccatcttctccaatggctgaactggttgacaagtggtcagcaaatggaatgaagaacatgttcggccagcaggtaaagctggttgagatgcagtctgaatgcggagctgtttccgcagtacacggtgcattagacggcggtgtactggcaacttcctatacagcatcccagggacttatgttaatgatcccgaccatgtaccgtattgcaggtcagttaaagccaggtgttatccatgtagcatccagaaacgtggcaacccatgcgatttctattaacgcagagcattccgatgttatggcctgtcgtcagaccggatatgcaatgttagcatcctcttcaccacaggaagcaatggatttaggtgcagttgctcatctggcagctattaaaggccacgtacctttccttcatttctttgatggtttccgtacttcccatgagatccagaaagtagaatgtctggattacgaagatttaaagaaactggttgactggaaggaactggaaaaattccgtgagaatgcattaaatccagagcatcctgttttaagaaccacaggtcagtattctgatacatatttccagagccgtgaagcatgcaatacctattatgatgcactgccggatatcgttgcagattacatgaacgagatcagcaagatcacaggaagagattataagccatttaactactatggtgctccggatgcagagcgtgtgatcgtagtaatgggatctgcaagcggcgttctccgcgagactgtagattacttaaatgcaaagggcgaaaaggttggtttcattgatgctcatctgtaccgcccattctcagcaaagtatttcttaagccagcttcctgagactgtaaagatgatcactgttggcgaccgtaccaaggagccgggtgcagcaggcgagccgctgtacgaggatgtatgttctgtgatcctggagtcaggcagaaatatcaaggttttagcatgtcgttatggtctggcaagcaaggattatactccagaccaggttatcgcacagtttgacaatatgaaggcagcagagccaaagaaccattataccgtaggtattaatgacgatgtgacccatctgtcactgcctgtaggaccagaagtaaatactgttccggaaggaaccatcagctgcaagttctggggccttggttctgacggtaccgttggtgcaaataagaacaccattaagatcatcggtgaccacacagacttaaatgttcaggcttactttgagtatgacggcaagaagtccggtggtgttacccgttcccacttacgttttggcaagaagccgattaactctacctaccttgtaaaccacgcagatttcattgcctgccacaataagtcctatctggaccgctatgatatcctggcagatgcaaaggaaggcgcaaatgtgctgatcacctgcgactggaagggcgaagagttagaaaagcatttaactcctgcatttaagaaagcagcagcattaaagaagatccatctgtataccattgattccactgcaattgctgcagaactgggactgggaagcaggaccaataccattttacaggctgcattcttcaagatcacaggtattatcccgatcgaagaagcagttggatatatgaagaaagctatcttaaagtcctacggaagaaagggcgaaaagatcgtcaacatgaactacgcagctgttgataagggcgtagaaatggtagaagaggcagaagtacctgcaagatgggctgatatcgaaattccagaagagaagatcgatgagaacctgccaaagtggatccgcaagatccagatgcctgtaaatgctatgaagggcgataatattcctgtcagcgatttcaccgatctgccagacggaaccatgcctcagggtacttccaagtacgaaaagagaggtattgcagttaatattcctgtttgggacagcgagaaatgtatccagtgtaatatgtgttcctacgtctgccctcattcctgtatccgtccattccttgtaaatgaggatgaggcagcaaaggctcctgaaacctttacaacaactgctgttaagggcaaaggcgcagaaggcttacgtttccgtttacaggtatccgctcttgactgtacaggctgcggaagctgtgcaaatgtatgcccgtctaaggaaaaggctattaccatgaagccattagacaacaacttaaatgaagcagataactgggaatatgcaatgaagttagctccaaaggcaaatccgtttggaacaacaactgttaagggcagccagtttgagcagccactgttagagttcccaggctcctgcccaggatgcggcgaaactccttatgcaaagctgatcacacagctgtttggtgaccgtatgtatgtagcaactgcaacaggctgctcccaggtatggtccaccagcttcccttccttcccatataccaccaaccacaagggacagggacctgcagtaggcggctccttatttgagaacaacgctgagtatggtatgggtatctggctttctgttgaacagcagagagaaaagctggctaagcatgtagaggaacttgctgaaaagacagatgatgccaagatcaaagagacagcagcagcttggctggcatcttacaatgacaagagctcccgtgaaacaggcgaagcattaaagaatgccatcctggaaagcggtttattaagtgaaaatgcagatctggttgcagcaaatgttcctggagataatgtaaaggcactggctgaggcagttcgtgaaaactttgaccatctgaccaagaaatccgtatggttcttcggcggtgacggctgggcatacgatatcggttacggcggcttagaccatgtattagcttccggcgcagacgtaaatgtaatggtattcgataccgagatctactccaatacaggcggtcaggcatctaaggcaactcctaccggtgcagttgcgcagtttgcggcagctggtaagcgcagaaagaagaaagacttaggcatgatggcaatgagctacggcgatgtatatgtagcacaggtagctatgggtgcaaatcctgcacagttcttaaaggcagtaacagaagcagaagctcacaagggaccatctctgatcattgcctatgctccatgtatcagccacggactgcgctgcggaatgagtgatgttcagggcgagatcaagcgtgcagttgaagttggttactggcagttatacagaaacaacccagaactgatcaaggaaggcaagaatccatttatcctggattccaaggaacctcagggcgattttagagagttcttaagaggcgaggttcgtttctcatctctggagcgtaccttcccagaggcagccgatgcactgtttgagcgtacagaaagcgaagcaaaggcacgttacgcaagatacaaagaacttgctgaaaagaactaaaacaggagaagaagattatgagtacatttgtagaacggttacttgggggaaaagccggtacagttgtaacagtagaacctgactggatcgttatcaatgatggtgtatctcatgctgcggtagaggaaatctctgccgtagcaaaacctgaaaaggtaatggtcatctatgaccatgatgtaccaaccggacgcccggaagcagcagctattttaagaaagaacctggcatttgctgaaaagtacggatgtccttatatccaggcagaaggtgttggatatcagtatatgttaaatgaagtggtaaaaccgggccagatcattgtaggcggcggttcccacggaagtattttcggaagcatcggtgctctgggcatcaacgtaagcattcctgagctggcaagagcagctgaaacagaccgttacagcatcattgttccggaaacagtttatgtaaacctggaaggcagcttaaaagaaggcgtaactgttatggacgcagcacttgcattcctggcagaagatcatgagttaaaccgcaaggcagtggaagtttatgcaccatcctttgatgcacatgagaaagcagtattctgcagcatggcatgcattacaggggcatttactgcttccattacagaagaaaaacagtctgctggtttaaccttaaatctggcaactgtagagccaatggtcatgcttccatgtggtgatagaaatgaccagaagaaggctggaattgcttctagagcttctaaagctggcatggaattaaatgcaggccagatcggcggctatacaggcggaactattgaggagttacgaaaagctgcttctatgttagatggacacaagctggcattaggcttccgtttaagcatctgcccggcaaccagccgtgattatcttcaggctgcagaggaaggcattcttacaaagttcattgatttcggagcacagatcaacgcagcaggggaccacagcgttgtgatccagggacctggagctatgggacataaggaacgtctggtaaccaccggactgtacacctttacaggttctatgggctgcgatgacgcagaagtttatacaggctctgttgaaacagtaatgaacgcttcctttgcgaagcagatgtaaggagacagctatggaaaagaagttcagtggaaaaatctggaaattcggaaatgatattgatacagataccattatccctggaaaaagaggtactatcccggatcgtaacgagatgaaaaaatatgcatttgagctgttaaagccggaatttggttcaaccgttcagccaggagacatcctggtagcaggaaccaactttggctgtggttccagccgtgagcaggcagctaccgttctttcttacaatggtgtccgctgcatcatcgcaaagagctttgcaagaatcttcttcagaaatgcatttaacagcggcatccttcttcttacctgtgatcagatccaggacgtgtgtgaaggcggagatattgttacggtagatgtagacgcacagacggtcagtgtaaatggaaagaccttcaaggttggtgcagttcctgaaaatctgtataacattgtagcaaacggcggactgatcgaagatacaaagaagcgtcttgcagctggaaatgtgaaaatggatatcaagcctctttccatggaacagtgccgtaaaaaaggctacaccatggtagaaaagatattaaagaaaaatgcaggaaaagaacatgtggctcctggagatatcgtgatcacaaagccagatatgttcatgatccatgatatttatactacttatctgttagaaaccatgaaagacattggtgcagacaagatcgacgatccagataaggtaaccatcgtctgggatcactgtatgccaactgccgttgctaaaaatgactatgaccattatgaagctggtctggaactggcaaaaacctatggaattaagaagcttcacattggagaaggcatctgccacaccattatgcatgaagcaaagtatgcaaagccaggcgagatcgcaactgcaaccgacagccatacaactacttatggcggtgccggaaacttctgctctggtattggcacagcagaaatggcagcagctcttattaccggagaactttggttcaaggttccagaggctatcaagatcgtattaaacggccatttaagagacggtgttatgagtaaggacgttatccttcgtatcttaggtgatatcaaggccgacggcggacagtacaaatctctggaatttaccggtcctgcagcccatgaaatgagcatggaacagcgttttacagttgcaaacatggctctggaagcaggcgcaaagtgcggtctgtttgaggctgacgaaaagacagcagagtactacggaatgccattagaagatatcgactgggtatgcgtagatgacgaagcaaagtatgaaaaggtacttacctatgatgtaagcgaactggaacctcagctttcctgtccacagggcgttgacaatgttcaccccatcagtgaagtaaaaggcaccaaaatggatgaggtatatctgggaagctgcaccaacggaagtattgaagatatggaagcagctgcaaagatcttaaaaggccgtaaagtggcaaaaggactgcgttttatcgttgttcctgcaactaataccattttcaaacaggccattgaaagaggatatattaagacttttattgaggcaggtgcagtgatctgtcatccatgctgcggactttgctgtggtatgccatatggtctgatgacagatgatgaaaggatcctgctgactgcaaaccgtaacttcatcggacgtcagggaaccaagaaaaccttaggttatctgtcaagtcctacggtagcagcagcaaccgcagttatgggtgttgtaacagacccggctgatctgccagcactggcttaaagacaggcggttcgatgttctcccggactccgggaggacatctgtaaacaggaggaaaatcaatgataaagaattttgaacagctgaaagaaatgttaaaagctatgccggtaaagcgcaaagtagcagtagtaccggctcaggatgaacatacactggaagcaatcagtcatgcttatagggacggcatggttgagccggttctgatcggtgatgagccaaagatccgtgagatcctggctcagatcggcacagatgcagataagatgaccattatccatgtggaagatcctacggaagccatccagaaggctgctgatatggcaagagacggtgaagtagactgcattatgaaaggaaaaacagagacaggagccctgatgaaggtactggtaaaccgtgaaagagggatcagaaagaacgataccatgagtttacttgctttcatggaaagcccgaattaccacaaggtattcgctattactgatgtaggccttcttacttatccttccaaagatcagaagaaagcagctatccagaatgcagtagaagcattccatgcattaggcgtagaacagccaaaggtagctatccttgcagcagtagaaaaagtaaatcctaagatgaaggaaaccgtagaagctgctgagatcaaggaagaaggcgtagaaggctgcatcatcgaaggcccgatcagctatgacctggctatggatcctgcttccgcaccaattaaaggctatgtaagtcctgttgcaggagatgcagatcttttagttgttccggatattgtaagcggaaatattgcagcaaagaccatcactgtaattggtggcggaagaaccggcggcgtggtactgggagcaaaggttccggtcctgttggtatcccgtgcagcaagtgcagatgataaatatatgtccatcgtcattgcggcgttagtgggcagcagataatagggggaaaaacaatggagaaaaaattaaattttaaggtgtgtgggcttcctgcaaagtatttcattccattctttatcattgtaatggcaactgtttaccttggctttatgccggttgttaagatctattccaatgatgcaggcaagtacatggcaaccagctttatcatgaccatcgcttatctgatggcagttggcggtctgttcttctggcttggaaataccatcccgatcgtaaataactacttaggcggtgcatgtcttctgcctctgatcggtgcttctttcttaaattacgttggtctggttcctcaggaactggtaaacggagttaaggtccttatgggcggcggtttccaggatgcatatattgccatgctgttagttggctccatccttgttatggaccgtaaggttttacttggtgcaactgcaagatacatgcctaccatcctgggaagccaggtatttgcattaggcttctgtatgttagcaggtctggttaccggatatggtattccagaggcactgtttgatatcggcgcaccttgtatgtccggtggttccggcggtgctatgaccactctgccagctctgtattccagcctttccggtacagatatgactccaatggcaggaaaattcctgtgctacgcatctatcgcaaacgtactggctgttgtattagctgctattgtaggttctgtaactgctaaaatgaaaggcttaaatggtaacggcgagatcctctgctccaagaaagcacaggagagcaaaacagaggagaaggaacagaagagacttggaacttctgctgattatgtagcattaggttctggtattttcatgagcttctgtctgtacttactgggtaatatccttggaagccttccaggtttcggtgtgatcccgggacttgcatggaccattatccttggaatcatcattaaatttaccggtcttcttccagaccagtttgctgacaactgtgtatactccatgaactttgcattaagagcactgcttccaatgctgatcgctggtatcggtatcaactccctgaagttctccactctggcagaatacttcagcccaggcgcattcgttgttatcttcttagcagtattcggcgcaatgttaggtgcaatgattttcggaaagctctctggtctgtgggcatatgaagcaggtgttacagcaggtctttgctgctgcaacatcggtggttccggtgacctggcagttttatctgcagcaaaccgtatgaacctgctggcattcgcttctatctctacccgtatcggtggtgcattgatggttatctggatcggactgttatatccattgttccattaaggcaggcacattacaacacaaaatcaggcacgttggcgctatgtcagcgtgcctcttttagaaaataggagaaaatcattatgaaaaactataaagtatttgctatcaaccccggttctacttccacaaagatcgccatgtttgaaggagaaaaggaaattttttccagaaatatcagccatgatgcagaaaaattaaaagagttcaaggagatcagcgaccagcttccatacagaaaggaaatgatcttaaatgtcctgaaagaagaaggacaaaccttagaaggcgtagacgcattttccgcaagaggaggcggtctggtaaatgtagaaggcggcgttttcactattggtgacaaacttcttgagcatgcaagaacctgctataccgtaaagcatccggcaaccttaggcgcacagctggcagatgcattttccaaagaattcggcggagttgcatttgtagtaaatccaccagatgtagatgagttccaggatgtagcccgtgtaaccggcttaaagggtgtatacagagagagccgtatccatgcattaaaccagaaggagatcggcatccgttttgcagcaaagcagggcaagaaatatgaggacatgaacctgatcatctgccacattggcggcggtatttccgttactgcccatagaatgggaaaaatggtggactccaatgacattgcaaatggtgacggcccaatggcaccaacccgctgtggccagcttcctgtaaaggatgttgtgaccatgtgctattccggtaaatatacagaaaaagagatgcgtgagaagatcacaaagaccggtggcctggtagatcacctgggaacttctgatgcaagagaagtaactgccatgatcgaaaatgggaataagtatgcgaaattaatttacgattccatgatctatgagatcggaaagacagcaggttctatggcagcagtccttcatggaaaggtggacgggatcgtattaacaggcggcatctcccatgacaagtatgtagtagaaaaactgacagaaatgctttcctttattgcgccgatcactgttatggcaggcgagtttgaaatggaagcactggcagcaggtgcgatccgtgtattaagcggggaagaagaggcgaagacttatacaggtattccagtatggagtggatttacatgctgatggtaaaaaaggccctgatctatgtgaccggacttttattcatggcctttggagtggcattttctgttaattcttctctgggagtttcaccggtaaactcccttccctatgtgatcagccgcattacaggactggatcttggaaactgcgtgatcggcatttttgctttttatattctggtgcagatattattgttaagaaaaaaattccgtcccatagatttgacgcagctgatattttccacgatttttggccgttttgtagatgttgcaaagaaagtggtgggagattttgccattcccacctatccggggcagctggttatgctggcgatcagtatcgtttttgtagcaataggcgtatgcctgtatatggatgtgcagctggtaaatatgcctatggaaggaatgacccatgcagtaaaccgtgtattcttcccggacaagccttttcatgatattaaggtcatcatggattgtctgaccgttgtgatcggtattgtcctttcttttgtatttcttggaaaactggatggcatccgggaaggaaccgtgatatgcgcattgctggtaggaaagctgatgaagccgatgcagaaggtgttaaaaccggcagtagagaagatctgtgggataaaaggaagtcgttgatatggaaaagaatgaagagagaaggtgtgatgcaatatgaaactggaagcagcagtaatacagggagatggtgtaggaccggagatgatggaagaggcagtacgggtgcttcaggcagtctgccgccggttcggccatcatttaaagctgtatcctgttttagcctgctctcaggccattgaagcaggaaaagaacctcttccacaggaaagtttaaaaatctgtacccaggttccggctgtcttatttggaaattcaggtctgaaaaaataccaggactggccgttggataagcgtccggaaggcgctcttatgatactgagaaaggtactgcaggtaagtaccaatatccgtcctgtgcgtatgtatccttctttaaaatgtttttctcccttaaaagcagaacgtctggagcagggaatggatgttgcttttgtccgtgatattgcagggggagttttctgctctgccaaagtccagggaaatggggacggcggtcgggaagcttatgaatatgagtattataatgaaacaattgtaaggaagactgcctatactgcctttaaactggcaaaaagccgaaagaacaaagttaccaatctggacaagtcaaatgttcttggcagttcccgtctctggcgtcagactgtacagcaggtttccgaggattttccagatgtggaactggaacatttatatattgataatgcagccatggagctgatccgaaatccaggccggtttgacgtttttgttacctccaatctgtttggtgatataatatctgatgaaggaacagaactgaccggaacgccctatctttatccctctgcggaattaagtaatacagagcaggggatttacacaccgaaccagcttcattatccagatgagtctgtgatcggaaaagatatggtcaatcccattggcatgattgcggctgcagcccagatgctgcgcctttcctttggcttagaggcagaggccggagccatagaagaagccatccgccaggttttagcggccaatattgcaactgcagatatctggcataaaggaaagatcctggtaggaacaaaagagatgggaaaacggatcgcagatgagatcgaggcagtttcctaaagaagtatatttcataataaaggagaaaatatgatggaattaccagttacaaaaatgtcacggatcgtaatgccggcttcaaccaatgatgcaggaaatctttatggaggaagactgcttgactggatggacgaagtatccggaattgcagcaaagcgctttgcacattcggaagttatgacagtagggattgaaagcattcgttttatgcgtcctatgcctcagggaagctttattgatatcaatgcagaagttgtccatgtaggaaacacttccatgaagatcaagatcacagttatgatggatcaggacccggaagaagaacaggtccagacagcagaagcattctttacctttgtagctgtagatgaaaatggtaagcctcataaagttgggcgtacattgtaggtcaggttcgagagattatttaagtaaatagggatgaaataaatgggactggatgttgcttcgcaaggagtgacatcctttttggcttttgaataacaatttaatttagtcaaattgattctaagtgacgaaagtgaaatgattgacgatgatgatgaagtcgtgtaaactaaagatactcaaaaatagctgctttaaaaatatttgtttcttagatccgccttatgatacagacttttctacttatgcacagaatgagtttggacatgaggagcaaaaacgtctgtgtgaatgtttaaagcggacgcccgccaaaatattactgattattaaaaatacggattttatctatgaattactaaaacttcccacaccgatgtggtgtgttgaaccttgaaaattcaatatttcagccaataaaaaagggagtatcctaaagtttgtgtaaacc

SEQ ID NO: 3532 - DNA, 109648 bp, Unknown
  gut microbiota DNA sequence
aaataataaaaattagaatgttaacatgggaaacacggactagacgtaaaccaattccaatggtagaattgacatagattacgttgtgaaaacgaaaggagaactattaaaatgggcatgatagaaacaaagacagctaatgccattcgtgtattatctgctgatgctatccagaaggcaaaatccggacatcctggacttcctttaggatgtgcttccgcagcttatgaattatgggctaatcatatgagacataacccggcagatccaaagtgggtggacagagaccgtttcatcctttctggcggacatggttctatgctgctgtattcattattccatttatttggctatggtgatctgtctatggaagatttaaagaacttccgtcagatcgactcccttacaccaggacatcctgagtacggccacacagtaggtgtagaagctactacaggacctttaggacagggaatgggcatggctgtaggtatggctatggcagaggctcatttagcttccgtattcaacaaagatgacattaagatcgttgaccattacacctatgtactgggcggagacggctgtatgatggaaggtctttcctctgaagccttctctttagcaggtaccttaggacttggaaaactgatcgttctctacgactctaacaatatttccatcgaaggaaatacagatatcgcatttacagaagatactgcaaagcgttttgagtcctatggatttggcgtattccaggtagaagatggaaatgacttcgctgctatcggcgcagcgatcgaagcagctaaggctgatacagaaagaccttctctgatcgttcttcatactcagatcggatacggctgcccggctaaacagggtaaagcatctgcacatggtgagcctctgggcgaagagaacatcattgccatgaaggaaaacttaggctgggagagcatggagccattctatgtacctcaggatgtttatgaccacatggctaaggtaagagaaagcttaaaggcaccagaagaagagtggaatgcaagatttgcagcatactgtgagaagtatccggaaatgaaggaactttgggatcagtatcatgacaaagacctgcctaagaagctttgggacaatgaagaattctggtcctatgaggacaagccacaggcaaccagaaatctgtccggcgagctgttaaataagatcaataaggtagttccgaacctgttcggcggttctgccgacctggctccttccaacaagaccaacttaaagggcgagggagacttctccaaggctgattactctggaaagaacctgcactttggtgtaagagagcaggcaatgactgctattggaaatggtctggttcttcacggcggcgtgatcccttatgtagcaaccttcttcgtattcagtgattacatgaagccaattgcaagactgtcatccctgatgaaggtgccgctgatctacgttctgacccatgacagcatcggtgtaggcgaagacggacctacccatgagccgatcgagcagttagctatgttacgtgcgcagcctaacttccatgtattccgccctgcagatgcaaaagagactgcagcagcatggtacagtgcgattacttctgaaaagacacctaccgctctggtacttaccagacagaacctgcctcagttagcaggaactggccgtgatgcagtaaagggcgcttacattgtagctgattccgcaaaggaaactccagatgcgatcatcattgctaccggttctgagttaagcctggcagtagaagcaaaagaactgctgttaaaggatggaatggatgtccgcgttgtatccatgccatgtatggacctgttcgaagagcagagcccagaatacaaagagtccgttcttccaaaggctgtaagaaagagagttgcagtagaagcactttctgacttcggctggggccgttatgtaggccttgacggcgcaactgtatgcatggaaggcttcggtgcatccggccctgcagcacagctgtttgagaagtttggatttaccgcagagcgtgttgctgagactgtaaagagtctgtaagacgtaaaaatcgatggatgcgccgaaggcgcatcctgatatcgcaataataagataccccggtgaccgcctgaaaaatggcagctgccggggtgtttttgtctcaatggtgcatacttgtgcaatgaaaaagtttgacacaagcgaccgcgccaaaggcgcggttaaccgttttattcctcgatcacctgtatctctaaataatcaaaatccacagtctcaataaaattatcctgggtaaaccgggctttgtcgtgatatttaaaatcctggactgtagcatccagccacatgggcttttccaggtcaaacttatagcatatttcatctaaacaattaaaaaccatctgggttctggaaatagaataatcgccgcagcaggccaccatatctttcaccagatggttgtctttcatgatctttccccacatccgaaacatgtattttccagcctttcttttttgttgaaccgtgtgtacatgttagttagtatagcatagaatactgcgtataatctataaaaaacggctgcaatcagaatattctttcatgcagccatgaactgccatattgggccgaaaaagatgacgctcttttatctgttttgcagaaatatattgatagagactggaatgataaggaccttaaagtgatcttatgtggctctgcacttagctttatggagaaaaaggtactcagtgaaaagagccctctgtttggaagacgtgattcgcagatcaaattagaggcgttcaattacttagatgctgcgaaatttgttccaaactattcaaatgaggataaggcaatttgttatggaattttcggatatatcccttgtaaataatattgttgaacagatcgcgtttggcgaaaatacgcttaatacgattgcgggaaaaattggagaaaaagaaccaacagtattatactccctggataaattaataaatgttggtctggttgaaaagaaaaagtgtattacagatgagaaaaataaaaagaagacccagtatgttttaagagattatatgttcaaattctggtatgagtttatcccaaaggctaccagcgtgatcgagatgggacagggagagatttattatcaggatacacagagtggtttgaagcattatcagaagaggatgtattgttgtttacattagattcactttatgaataaaaataatattaaatcatgtttaaaagcagtacctgttatgggcggacatgccgcttgctgggtaaaagcaaagccaaatgcattctctggggagaaggaaaatgcgaaagtaaagatccacctttgcggcggcgtggaaacaagggccagctgccaaacagatagctggcccttgccctgttacaggttttgtagtaagctataactattgacaaaatcccccgaaattcgggaggagaggaggtacttgggcggtggagcaggctattactgattatgtgaaatttctggcagatgccagggatgcggtgtatcgtctgaataatgatcaggcgacagcaaagcagttaaaagaacagggagagcgccaggaaaaagagttggcagctgcgaaaaaggcagtgacagattcggtgaaccagaccataaaaaagcggcgcagcgagatcgatacaagctatgacaaagagatcgcaaaaggtcaggaacggctgaaaaaagccaggacccagcgggaaaaagccaaaaacaagggaatgaaggaacggatcgcagaggagaccagtgaacttcgggaacacaacagggacttgcagatccagatgaagaccatgttccagaaggataaagtgcctgtattctgccgcactacattttattattccctgtactatgcaagaggacttaaggagcgtctgattggttttattacgttcctgatctgctttttagcacttccatgcggtgtttatttcctgcttccggaccgtaagatctggtatctggtactggtttattttgcagatatcattattttcggcggtctgtatgtgaccattggaaaccgcagccgttcccgttatcatgatgccttaaagcagggccgggagatccgcaacctgttaagctccaatgaaaagaagatcaaagtcattgtccacagtattgaaaaggacggcaatgaagatatttatgatctggagaaatatgatgatgagattgcctgcgcacagcaggaactgtctgatatagcagcaaagaaaaaagatgccatcagcagctttgaaaatgtgaccagaaatattattgccgatgagatcgaggggaaccacagggcagagatcgaagaaaaagaacagaaattacaggaagtaaacgacagtcttgctcagttagaaagtagcatccgccagcagaacatccatattacagacacctttggtccatatcttggaaaagagtacctgaatacggataagcttttaggattgtctaagttgatccagtccggaacagcttccaatattacggaggctattgaaatggataaaaatggggtaggaaaaacagaaacaaattaagataacagacagaagagagagacagaataagcagacaatgtaagggggacaatatgtacagagtagtgatcgcagatgacgaagtgctgatccgcatgtatattcgggaaatcttagaaaacaatggttatgaagtagtaggagaagcagaagacggtctggatgcgatcgcagtgtgcagacagaaaaagccggattttgttattatggacattaatatgccggtgatgactggtctggaagcaacgaaagtgatcaacgaggataagctggctggatttgttattattttgacggcttaccgtgacaaggaaattgctgatcaggcagtcaatacagatgtaatgggatatattgtaaagccggtagatgaagatacactgataccggcagtaaagatcgcgatccataactataagcagagagaagctatggcgaaggagtttcacaagacgcaggaagccctggatgatagaaaatatttagaccgggcaaaaggtctggtgatggagcggaaaaacatgtctgaaaaagaagcatttacttatatccgcagtctgtccatggataaggggatctctatgacggaactgtcaaaaatgcttttgaaagcatatgaaggctgacacaaaagcagagagggaatttatggaacagaagaaaaataagcttctcagtgacatgatacaaaatgatacagataaaaaaatggtgcaactggtagaagcggcaacggatcttagctgcggggatatctgcacccttttagaggtggcgcattccctcccttttgtgggaaatctggaaggcggagatacatacatcaatgtgcttacaagagaaaaagagtccatggtcattgctcagtacagacatccaaactatgatctgtataaacgcagtatcattggggagattgagcgcagggaagatgagccggctgtgtaccgggcgctggaagaaggcatttccggccgtggactaatcggcatcattgatgaaggaagaacggtagtgcggcatactgtaagccctatacttaacagcgaaaaaaaggtaataggggcgctgacatacgaatatcccaatgccggtgcagatacagagtctatccgtattatcaataatcaggaaggaaaacaggatccttttaacaggcagcttggaaaagccagcgattatcttcaggatgccattcttctttatgatgcaaatggaatatgtacatttgtcaatcccaaggcagaagttctgtatcaggataagggatttgaactgcctttgattggccgcagatgcagcgaactgcacattacggattgcaattggtctgatcttacagaacatcgtggcgtaatacggagagaggtacgtacaccgaatttcatcatggatgcggtcatcagcggtatctgggaaaatggcacctgccagggcgcagcgattatcttccgggataagacagtggtacatcagatggaggatgagatcgcttaccgcgtggcgctgatccatgaggtacatcaccgggtcaagaataatcttcagacgattatcagtctgatcgggttggaagcggtccatacaaaggatgaaaaagtaaaagcttttgcaaagaccattaccagtcatgtgcgcagcatgaatatcacttatgacctgctttctcatacaggaagtgaaaatgtgggattaaaagtcctgatctcccgtattacagatgttttactggaaaataactgtttaaaagaaacgtgcagtatttctacaagggtagatggggatgatgtgatacttacagaaacaacggcgtctacggtggctcttattgttaatgaactggttcaaaacagcttaaaatatgcatttaaggaccggaaacagggacagatcaggctgaagatcgaaaaaggcgccagttactcctggatcacagtgcaggatgatggctgcggctttgacaataagaagatttccagggcaaacagcggactggggctccgcctgatcagcagtctggtacaatcaagcctgaaaggagaattgtttatagaaacaggggaaaatggaaccagtataagattttctttttccatgccccaggctggataatctaaaataattctaaacataaaataaaaatagtttaaaataaaacttgttaaactattgacaaaataatgtgtgagtgctatgatgtagacaattaaagcgatatctctttaacactgaaaattcaattaaacctgatatgcaacggcgtatatcagtaccacagaaaggcatcgaagcccagaaactttttacagagtttttgggcttttttattgcttatgatctgcgtggattttcggacgttacctggagttgtggcccagttaagggctctagggcctttatatgggtctctcccggcggcggttttacaactgccggaaaaaacttacgaaaaggagtcgtttcataatggaaaacaagcaaaataagggcggcggtttaaacaagagcttgaaactcatctttgtttatacagttgctacgggttcaatttttacgttcgtaaactattgggattctgtcttttacggatactgcggaagcggtacattccttgcatttgcactgatgacagtggctattcttccggtagcccttgtatacagtgaactggcatctctgttccatacatcaggcggagagctgatctataacacagttggtatcaacaaacacgtaggtttccttgcttcctggctgatcatggcagcgtggatctctgttccgccggctgttgttatggcgatcatgacatgggtaaataagacctttgccctgggacttggaacatggcagatggtaggctgtgcagcggttcttttagtactgtatttctttatgagtatccagaatgtacagttcttagttaaggctcaggcaggtatgttgttctgcaacattaccgttacaattttaacaggatttatccttctgttctccggtcactggcatatttcaaattttggaaatattttccagtctactctggactccgtatatggtattcctggatgggtcattggcatggcacttctgatcacaccatacttcggatttgaaacagtacctcagatggttgaggaaggtgacttcccgatcaagagttccaagaaagcaatctgcggttccattttaacctgtggctgcatttatgtgttctattatttctgcgtagcaggtctggatggattaaaggatgtgtatacaaactttgcacaggatggtttcttaaccattgctaccatgcagaatgtactgggctggacattctggccgatcattgtaggtatcctttcctgcctcttaggtatgggcgcttccttactgggtttctggatgtctaccgtccgtatgctgtactctatggcaaataagaacttcctgccaaaggtattcgcagctgtaaacaaaaatcagcagccaatgcttccaaacgtattcctgctggtattatctcttatctttatcgtacttcagaactcctcagactttatgagcgcgttcttcaacctgatgagctttggctgtgcatgtgcatatgcgctgactatgatctccgcagtatgtattcatagaaaacatccagactggaagagttccaacaccgtaaagggcggtgatgcgttccgtctctttgcaatgtgtatcgcagttgctatcgcattcttctgtacactgggacagggaattgattcctggatctgctttggcgtatatctgggtgtaggtgttgtgatctggctttggatggtacttgtaaactggaagaaacatccggtagagatcgagactccggatggtatccagaagttctaaaagaaagttcagaaaagtttaaatgacatggcagacatgcctggataaagaaggagcataaaaacatgtctgatacaaaaaatacagaaaatgagtctggcggactgaagaaaagtcttcgtctgatctatgtatatgccattgccgcaggtgctattttcacctttatcggatattgggataccattttctatgaatattgtggtgcgggtacatttttaggatttatcctgatgacgctgttgatccttccgattgctatggtctactgcgaactggcaccgttgtttccaagggcaggaggagagctgatctacaatacagtaggtattaataaacatattggtttcttctcttcctggctgatcatggcagcctggatcgcagttccgccgtctgcagttatggccattgtccagtggatgttccatgtacttcatatccaaagcagcttccttcttattgaaggagttgctctggtagctcttattggttattgtgctctgagcctgcagaatgtggagatcgccggtaagatccagttgtacatgctcatgtttgccattgcaggttgtattgtggcaacggtagccttcctgttctcaggagtatggagttttgataactttaagaactttttctattcacaggtgggcagccattttggcatcccgtcctggatcataggaatggctcttttgatcactccgtttttcggatttgaaacagtgccgcagatggtagaagagggagacttcccaattaaagactctaacaaagccatcctcggttccatcgtttcctgcggtgttgtatattccctgtttttcttcggactgggcggcatgccggtacagcctttggtagaagaagggggcgcagctgttaatggttttctggccatcaccatgatggagcagttaggcggcggctggggtgtatttgcagtgatctttggtattgcagcgatcctttgtgccattggcacctgcttacttggtttctggctgtcaaccgttcgtctgatgtatgcaatgggagaaaacaatttccttccaaaggcatttacaaaattaaacagtcatcagcagccggtattaccaaatatcctgcttctcatcatatccctggtattcctgcttttgcagaatgccaccacctttatgaatgactttttcaatctgatgagctttggctgtgcctgcgcatatgcgctgacgatgatctcagcaatgcggatccacaagaaatatccaaactgggtatctccttataaattaaaaggtggaaatttcacaagagtattagctcttatcattgcagtagtcatcgctttcttctgtacgttaggacaaagcgctggttcctggaagtcatttggaatttacctgggagtaggagtcctcttatggctgtggatggtccttgtaaactggaaaaaacatccggtagagatcgaaacagtggaaggcttaaagaagttttagaaacttaattttgaacctgtacgggaaaccgtctggcatatataataactataatagttaaaacaataacaattttttatatgtaaaggagaatgtaaaatggctaaattggatggtaaggttgcattaattacaggagctgctgcaggacttggtgaaggtatttctaccgcatacgcaaaatacggcgcaaagctgatcatggtagacttatctccggaagtagaaaagactgctgaaaagctgagaaaagaatacaacgcagagatcattactgttgttgcaaacgtagctgaccgcgcacagatggatgcagctgctgcacagggtgttgaaaaatttggtgagatcaatgttgcatgctgcaacgcaggtgtgtgccgtctggctccttttgaggaaatggatgataagacccgtgatttccacattgatgtaaatatcaagggtgtatggaacacctgtaaggcagttatcccatacatgttaaagcagggcggcggcaacatcgttatcgcttcttctgtaaccggtgatatcgttgctgatgctggtgaagcagcatacgctatgacaaaggctgcattagtaggtctgaccaagtgcctggcagttgagtatgcaagccgcaatatccgtgtaaactgctcacagttaggatatgcacgtacaccaatggttgagaagatggcagttgagtccaatcctgagaacccagaggcagctattgcagatatcgctgtaggtgttcctatgaagcgtcttgcaaaaccgatcgaagttggcgaactgttcgcattccttggaagcgacgaatccagctacctgaccggatcccagatcgttatcgacggtggcagcacactgccagagaccatgtctattggtaccaactaaaaataacttgaaaatcaaataaaaccgcactataatagtaaagaactggaaaaggggagctggcagtcagtcggctgagagtgggatgtgtttcccagacccgtaacctgatttggataatgccaacgtagggatataaaaccgaggtctttttagagtgtgatcttagcggatatgtctgttgcaggcatatccgctttttcgtgtgcaatgagccaaagtccgcacttgcgggagaccatggcgaatgccgcgaaaaccggaaaaatgcggagcttttttccggtcttaggtcttccaggcggcatattgggggcaccaccttatgtcgcataataaaacgtggcctgcagtagaacatgtcaaacgtacattgtatacactgtgggaatgctgagaagggagaagacgattatgaaaacagcattaacgatcgccgggagtgattccagcggaggcgccggtattcaggccgacattaagacaatgatggcaaacggagtatttgccatgagcgcgatcacagcactgactgcgcagaacacaacaggagtagaggcaattttaaatgccactccggaatttttaggacaggaattagactgtatttttactgacatttatccggatgcagtaaagatcggtatggtatcagacaaagagctgatctgcatgatcgcggcaaagttaaagcagtatgatgcgaaaaatgtagtagtagatccggtcatggtagcgaccagcggagcgagactgatcagtgaagatgctattgagactttaaaggcagaattattcccgctggcaaagatccttacaccaaatataccggaaacagaagaactgacgggaatgaagatcacatctgccgcagatatggaagctgccgcaaagaagatctctgagacatataactgcgccgtactgtgcaaaggcggacataagttaaatgacgccaatgacctgctttggagcgaaggaaaaggacgctggtttgcaggaaagcgtattgataatccaaatacccatggaacaggctgtactttatcatctgctattgcttccaatctggcaaaaggttttgatctggaaacttccgtagagcgtgcaaaggactatatttcaggcgctttggcagcaatgctggatcttggaaaaggcagcggccctatggatcatggttttgccattgataatgaatacacgagggaggcaaagtaagaatggaaaagaaaacttccctttttgataatggactgatctggtttggcgcaggtgtttccctggctgagatcctgacaggtacttatttttccaccctgggatttggccgtggacttgcggctatcttactgggacatgtgatcggctgcgttcttctgtttttggcaggcgtcatcggcggaaacagccgtttaagtgctatggagacagtaaagagcagtttcggcaataagggcggactgttttttgccctgttaaatgtattacagctggttggctggaccgcgatcatgatctatgacggcgcactggcagcaggcggtatcttttcttccggacactggatctggtgcctggttatcggcgttctgatcattgtatggatcatggtaggtatcaccaatcttggaaagatcaataccgttgcaatgacagctttgtttttactgacactggtactgtgcaaggtgatctttttcagtggaaacagtattcttacagagccggatgacagcctttcctttggtgctgctgtagaactggcagtagctatgccattatcatggctgccgctgatcagtgactataccagagaggcagaaaagccggtagccgcaactgcagtcagcgctgtggtatatggtctggtaagctgctggatgtatctgatcggtatgggcgcatctatcctcactggtgagtctgacatcgcccagatcatgttaaaggccggtttaagtgtgatcgccctgatcatcgtagtattttcaactgtaacaactaccttcctggatgcttattctgcaggtatctccaacgagtccattttcccacagtttaagggacagtatgtggcagtagctgttacggttgtgggaaccattggcgctattgtgttcccaatggatgatattaccggatttttatatctcatcggttctgtatttgcgccaatgatcgccattcagatcgcagattattttattttacacagagacagaagaaaaactgcatttgataccagaaacctggtgatctgggtcatcggttttgttctgtaccgtatcctgatgaatgtggaccttcctgtaggaaatacactgccggatatgatcattaccattattttgtgtgtgatcgcaggtgcggtattacattgaggtaacaaacataagaaaatccccgtgtctgtacatatttgtacatagacacggggattgttgttatctacctggaaaaactatcaggtgacatgtctgtttagtctaaatctgtatcaggtggtgctcaattccttcgctctttaatatagcttcttccctctgatgacaggtaaagatgatacactggctgtcccaggcacctgcaagccattttaaggcagtttttaaacggtcatcgtcatagaggacgaaactgtcatcaaagatcagtggcatggtgccgcggtcgctgataaccagctttgctgcggcaagacgaactgcaaggtagatctggtccatagttccgctgctgacctggtcaataggcaccagacgggttggtgtgttcataaagatatttaagttctggtcaatgctcatactgcggtagatgccgccggtaataccttcgatcagttcagatgcagttttatttaagtaaagaccaaaagagtcgcggatggaagtagataaatgggtcatggtttcctgggccagatcaagagcatctaattcttcctgaatgcgctcattttctgtcagaacatgttttaactgctctgcctcattctttttggcagacagctgttctaatttctgttccagttcccactgaagccgctgctgtttctcgatctcttctgatacgcattcttctttttcctggagcctgctgatatcagctgccatggtatttaaggtattttcagactgttccacagccttgcttaaacgcaggaaaccggccagttttccctctaacgcttccattgcctcttcagaaatagaagggtcctgcagatgctttgaaaagatctcctgaagctgtctggtttctgtatccagctgctttttaaaatggcggctgcggacaagtagcatactgccggctacagcaaacaggataccgcagagaatggctaataaagcagggatctttataagagatccagaaagctgtaaaaaccggggcgcaaatcctgaaagcagggaaatggcagtatttgggaataagaggaggaacagaccgcttgccagcccggggactgccatcagaaacagaaaaacagctccgatcgtgcgggaatgtttgctgcaggcttctaaggcgttgttgtaatcctggtagtgtttccgggcttcttctgtatatttttctacagaggcctgattttcaaactggctgttgaccaggatctgccggcctttagccgctttttccaaaagcacttctttttctttttgctttttatccagatcattctttaactgtcccttttcctggcgcctggctgtaaggtggttggcatattcaggggcagagatctcctgctcgatcttgcggatctcaccaagaatattggcataacttttagctgcttccggaacaaaatgggcctccagctgcttgcgctggttttttaaataagcgctggctttggtgatatttaaagcaatgcttccggaagtgttcagatttgcgatataatttcgcagttccgagaccattccgccgtcagtggcacattttaactgaccgatactgatggtattgtcataggcagtttcagacaggccgcagcgcagcttgtccaataatgcagttgtattttcttcttcttttcctgaggtttcgttgatcacgcacaggcgcttgtcccccttctggaaacggcgctcaatgcggtaaacttccccgtcacattcaacccgcaggaaaccttcatagaccccgctctgggtccagggctgaaatttggaataggtatcatttttagaagcgcggccccgctggcgctcaatgccaaagagcatgcccttgataaatgtatgtaaagtggattttccggcttcattttttccatagactacatttaagccatcttcaaaggaaatgtccctgtcatgaaattttccaaagccgtcaatatgcagactgagtatcttcattgggtcagctcctttcgtcagtagtgtggagtaaggcatttactccataatacagtgcttttttctctacaggactcatatcttctttctgaagtgcctggatgaaaaatccgatcatgtcactggaatgctctgcaaacagggcagaaaaatcgtaatccggctctgtatcgtcaataatttctgcaatgcgaaactgtgcttccaaagaagataagtcgaattctatatctgggtcgcgcatgccttttaaacggaaacgataaatattttcttccccgcgtttgcggatctctgccatgatccggtcagccagttccatgtttgtggtttctctggaaacttttactgccagaggcagatattgaagggtggcagcaggaacaaattccaggtgtgttaatttatgggtctcaggatggatctcgccggtaaaatatccatggactcccgtttctgtcagatccaaaggttccggtgatccacagtaagcaatcttatcctcagagatcacctgaggtttgtggatatgtcccagggcaatgtaagaaaatggggataactccaggctgttaaagttaataggcagatgggcagtgtctccgccatgtgccatcaggatctggatatgattgttcacggaaacctgcatatcttctaacagaggttttttgatctctctggtgtgataactgaaaccgtaaatttccgtattgatatcctcaaaataaacggaattaaggtccgggtccatgaaaaaagtaacattggggctccatgaaaagcttaaaagagcggagttttcccgtatgcggtcatgatttcctgcaatgaggataacttttacattgggaatggtggtaaacagatagttgacttcttttaagtcccgcaccagtggctggcgatggaacagatcaccgctgatgaacagacagtctgcctgcatttttccagcctgggcaatgatcttcttaaaggtatctttgatcgcctgggcccgttcacttccccagggtttatctgcatcgggagtcattccccagtggatatcacctgtgtggataaatttcatgaatttctcctttaaatagatatactcccgaaacgtttcttgcacctgcgcaaaagagtctcgagagtacatatggtgcaaaacagatggattgctttgcgtcgtatattgatattataactcgcagttatttacagttcttgggaatgggataacgtcgcggatgttggacataccggtcaggtacattacgcagcgctcaaagccaagtccgaaacctgcatgacgggtggaaccgtatttacgaagatccaggtaaaagccgtaatcttctttcttaagtcccagctcatccattcttgcaaccagcttgtcatagtcatcttcacgctggcttccgccgataatctcgccaattccaggaaccagacagtctacagcagcaacggtcttgccgtctgggttcatcttcatgtagaatgccttgatctcctttggataatcagtaacgaatactggtttcttgaagatctcttcggtcaggtaacgctcatgctcagtctgcaggtcgcagccccaggataccttgtagtcgaacttgtcattgtgcttcattaacagttccactgcctcggtgtaggtaatgcgtccgaactcagagttgagaacgttgtttaaacggtctaacagacccttgtctacgaagttgttgaagaagttcatctcttccggagcatgttctaatacatacttgatgacatactttaacatgccttctgcaacgcgcatatcatcatccagatcagcgaaggccatctccggctcgatcatccagaactcagctgcatgacgggtggtgttggagttctctgcacggaaggtaggtccgaaagtatatacgttgcggaatgccattgcgtaggtctctgcgtttaactggccgcttacagtcagattggttggctttccgaagaaatcctgcttgtaatcaacggttccgtcttcattctttggaatgttgttcagatccatagtagtaacctggaacatttcacctgcaccttcacagtcgcttcctgtgatcagtggggtgtggacataaacgaagtccttttcctggaaatactgatggatggcataggcaatcagggaacgtacgcggaatacggcctggaaagtgttggtccttggacgtaaatgtgaaatagtgcgcaggtactcgaaagagtggcgctttttctgcagagggtaatcagatgcagatgcaccttcaacagtaacctcagtagcctggatctcaaatggctgctttgcctgtggggtagcaactaaagtacctttaacgatgatagcggttccaacgcctaacttggaaacctgagcgaagttttccagagtgtcgtggtaaacagcctgaagtgtctcgaaataggttccgtcgctgataacgatgaaaccgaatgccttggaatcacgaaggctgcggatccatccgccaacggtaatttccttgtccaggaacttttccggatttttataaagttctcttactgtaactaaatccatgatgagtaatatctccttttctccaatacaaaatttctaaaagcaaaaatgcaatattataaggtattataaggtatttcacataatgtttcaaggttttcatgcgtttatgcaggttttcctagcgcttttaaatgcagggtcccggtacagccatgaaaaggaaaaaatgtcccacctaccaacacacttggttaatggcgggggacatatagtgcccggaggatttttagggcacaacatcttgggaaaagtgtaaaatataaaacatgatatcgaaaaatgtcggaaaactgcataaaaaacacaaaatatattaaaatatttgtgtactatttataaagtttgtggtataattatgtttaccaaaattatataacagcaagaggtgataacgtgattaaaaaagaaatgattgccatgcttttagctggcggacaaggaagccgtcttggcgttcttacacagaaagtagccaagccggcggtatcttttggggggaagtaccgaatcattgattttccgctgagtaactgtatcaactccggtgttgacaccgttggtgttctgacacagtaccagcctttacgtttaaattcacatatcggaattggtattccgtgggatttggacagaaatgttggcggcgtgacaatcttacctccatacgaaagaagcaagggaagtgactggtataccggtactgccaatgctatttatcagaacctggagtatatggaagcatataacccagagtatgtgctcatcctttccggtgaccacatttacaaaatggactatgaagtaatgcttgattatcacaaagcaaataatgcggatatcaccattgctgctatgccggtaccgatcgaagaagcaagccgtttcggtatcctgatcactgatgaacataaccgtattacagagtttgaggaaaaaccagctgttccaagaagcaacctggcttctatgggtatctatatcttcagctggccggttctgaaagaggctctgatcaagatgaaggacgagcctggatgtgactttggtaaacatatcattccatactgccacgcaaagggcgaccgcagcttcgcatatgagtacaatggctactggaaggatgtaggtactcttggctcttactgggaagcaaacatggagctgatcgatatcattcctgagttcaacctgtatgaagaatactggaagatctacaccaagagtgatgtgatcccgcctcagtacattgcttccgatgctcacattgagcgcagtatcgttggcgaaggtacagaagtttacggtgatgttatcaactccgttatcggagcaggcgttaccattgcaaagggtgctgttgttaaggactctattgttatgcagggaagcgtcatcggcgcaggcacatccgttgaaaaggccattatcgcagaaaatgtaaaagttggttccgatgttcagatcggtgttggcgaatacgcaccaagtacatatgaccagaaggtatatcagtttgacctggctaccatcggcgagaactccattatcccggacggcgtaaagatcggaaagaataccgccatagcaggcgagaccaccgtaggcgactatcctgatggattactggcaagcggaaattacattataaaggcaggtggcgtgaaatgagagcaatcggtatcgtattagcaggtggtaacagcaagaggatgcgggaactgtccagtaaaagagcagtggctgctatgccggttgcaggaagctaccgcagtattgactttgcattaagcaatatgacaaactcccacattcagaatgtggctgtatttacacagtataactccagatccttaaaccttcatctgagttcctccaagtggtgggatttcggacgtaagcagggcggactgtatgtatttacaccatccattactcctgaaaacggagactggtaccgtggtacagcagatgctctttaccagaacctgaccttcttaaagaacagccatgagccatatgtagttatcacctctggtgacggcgtttataagctggattacaacaaggttctggaataccatattgagaagaaagcggatattaccgttgtctgcaaagatatggaagagggaacggatgttacccgtttcggatgcgttaagttaaatgatgacggacgcatcactgattttgaagaaaagccaatggcttctgacgctaccaccatttcctgtggtatctatgttatccgcagaagacagctgatcgagctgttagagcgctgcgcagcagaagacagatacgacctggtaaatgatatcctggtacgttataagaacttaaagaggatctatgcttataagttagacagctactggagcaatattgcaaccgttgattcttactataagaccaacatggatttcttaaagccggaagtaagagattatttcttcaaacagtatccggatgtttataccaagatcgatgatcttccaccggcaaaatacaatccaggagcagttgttaggaacagccttgtttccagtggatgtattttaaatggtacggtagaaaactctatcctctttaagaaggcatacgttggaaataactgtatcatcaagaattctattatcttaaatgatgtttatattggtgataatacagtgatcgagaactgtatcgtagagagccgggataccatccgcgccaatacaacctatatcggaacacctgataacatcaagatcgttattgagaagaatgaacgctacacactgtagataagtagtaaatagtgcggcccgtttttttctgattccttcagaaggggtgcagcacgggggctgacggaggaagcggaaggagtattaaagcatgcaggtaacagatgtgagagtaagacgggtggagaaagaagggaagatgaaagcaatcgtctccatcaccttagacaatgaattcgtgatccacgatatcaaagtcattgagggagaaaagggattgttcatcgccatgccaagccgcaaggcagcagatggcgaataccgcgacatcgcccatccgatcaattccggtactagggaaatgatacaaagcatcatcctggataagtatgaaagtactttgctggagaatgaagaagaagcgcttgcataagcggcggaccactggtgacaacaggcacaatcatgtgatcaccttaaacaaaagataaaaggcagcgacagctgcagcagggataccctggaccagaaaatatggcagatgccatgactggtccggggtatttttatgtcgctataaatgaaagccagttgttacatgcctttggcactcccacaactgccgcccgcattcgtaatccgggctattgccctgcttactcatgcaggcttggttgccaaatagtttgaaattcaaaatattagcattgcatgtggggagtctctgtgctatagttagggcgtaaatgtttattaatagacattaatagacattgtgtacaataaaatgaacgatcacccgccagagcgggtcgatccgttgttatgtgttgaaagggagctgccgctggcagatctttcaagtggttttatgaggagaaaagcaatgatttcatacgagaatacaaagacagtaagagacctggtctggaatacgggaagagagtatgccggacgggtatttttacgctatgaggaaaatgacgtagtatatgaagtaacttatgatgagtttgcaactcagtgccgcggggtagctgcctggctgcgggagcaggacgcggcagcgggccacaaggtaagagtaggattaatgggaagcagcagtcaccattacctggtatttttattaggcgttatggccagcggaaatgtagtggttcccttagatgtacagttaaatgaagagacctttgcagataatgtaaaccgttctgacctggatattttattttacgactgggatcattatggcctggtagaagcagtaaaggagaaatgtccacgccttcgggcctgcatttccttacagcacggaaaacatgtgccatgttcggaccagatcttaaagggatatgcagggatcagtgtcgatccggtggtttctgaggaagactgtgctatggtgctgtttacatcaggaacaacaggcagaggaaagggcgttatgctttccaaccgcaacctgatggataataacttctgcaccacagataaagaccatcctgaaaaagaagtttacttaaatatccttcccatccaccatgtattctgcatcaacggtgatgtatttacggtcatgcgttatggaagcgttttgtgtctgaaccgggacatggcccgtctggcagcccatatccagctgttccagcctactgtgatccgtatggtgcctatggtggcaaaagccctttacaataagatcgctattctttccagacaggacacaggtcgttctatgaattccattaaacaggaggtgctgggaaagcgcctgcacaagatcatcagcggcggcggttatctggcgccggagctggctgctaatttcaaccgtctgggtatttccattgcacagggatacggcatgtcggagtgctctccaaaaatatcatccccggactggagcagaccggataaagtggcatctgtaggaaagatcgtagaccggtgccaggtgcgtatcgtagatggagagatccaggtaaaaagcccttctgttatgatgggatattataaggagccggataagacagcagaggcgatcacagaggacggctggctttgtacaggtgacctgggctatgtagatgaggagaatttcctgtatcttaccggcagaaagaaaaacctgatcatcttaagcaatggtgaaaatgtggcaccggagcagttggagaacctgtttgtggacgaccggctgattgaggatatcctggtatatggggaagatgacatgatcgcagcggagatttatccaaactttaagtatgcagacgctgcaggcattgaccacattgaggaaacagtggctcagatcattaaaaagcacaatgaaggacttccttcctataagaagattgcccgtttccatctgcgtgacattccatttgcgaaaacttcttccaaaaagattatccgcagccagtatttcagccagaagaagcaggaggcagaggagcaggtcaatgtacataaaccggaaaatgatctccagcagaagatctatgatgcagtatctgccgtgttaggccacagccgttttggcattgataccgacctttacagcgcaggactggattctttgggaagtgtgctgcttcttacagacctgtatgaaaaactgcagctttccatgaccttaaatgacctgttagagcatggttctgttttaaaactggaagctctttataaagagcgtgctgctgagggaaagaaagagtttgaggtccgtgacatttatccactgaccaatttacagctgtattttgcctatgtaatgcggggaaatacaacagccaacctgccatttttatttaaactggatccacatgtaaatgtgtacctgttaaagacagcagtagagagaatgtttgatgtgcatccggaattaaaatgcgtgatccagcttcatgaaggggcatacaagaattttagaaaggatgaccgcaaggtagatattcctctgatcaccttaagcgatgcccagtgggaagagaccagaaagggacttttacgcccatatatgtatacagaaaatgagcctctttaccatgcgggcatttatatgacagagtccgccaattacctgtttttagatattgcccatattatgggagacggcatgactatgaatgtgctgtttgaggatatcaatgctatttatgcaggaaagcaggtggaaaaggagaaatatacattttacgagtatattttagatgaaaaagagcgggatgccaaagggctcagacaggaaaatgaagcttattttgcagatctgatgaagggctttaagatcggaaagagtatccttgcaagatgtgacagtcatgacctggaacagggagaagacggcgttttaaaggaacattttaaggggattaaccggggcagactgttatccttctgccgcagaaacggcatttctgaaaatgtagtgttcttaactgcattcaattactgcattggtctgttcagcaatgaaaaagatacggtaggcaccagcatccacagcggaagaactgacagccgctggaaccgactggcaggaccattattccttacctactatttccgctgtacccagaagccggatgaaagtgtaaaggaactgctccagacctccggaaagcagatcatgaagaccatgggctgctatatttccaaccttcatgcagatgaaatgttcttccagtaccagggagatattttaaatatcgatcagatcggcggctggccggtgaaacgtgaaaaggtgcagttagatgctctgccattccatttacaggttatgtgggatgaaaagggatattattatgagctgcgttactggaagaatcggtttgacacacaacttttgaagctgtttatgaaagttatggagcagatcgtggcagctatggaagaggaaggacaggcggcaaacctgaaaaaccgtctttctgtagatctgttcccgctgcattatcatatagaagcaggaaaagtcaacgaagcagccggctgtgagctgatcccgggagtgggtgaaaatgaacaggtaaaggcatatgtactggatgaaagctgccgcaaacagccatttggagcctggggcaagctgtatatcatggatcatcctacccttggatggagtgataagatcaccaatccttatggaccgggaatgctgtaccagacaggaagggaagcacgtatcatgccggacggccgcctggaatttatggaacagggcggacgcactgtgatgcgggaaggtcttaccggcagaaagttcttagatctttataagctggagcagactttagagagcgcagacggtgttacaaaggcagaggcctatgtccgctacggcgaaggcaataaactggtactccaggcagatgtatggggcgtttctgaagctgatacagagcgcttaagggcttatgtaagggaacactgcggggaagccctggttcctgagtgtatttcctgtttttaagcggttttaaggggattttgttattgtagtttttctcaaaacacggtaaaatggaaaggtagcccatttttatgggaatgggagcgaaacgttataaatcaatatgtttaccgtaaaaaggagttttgagaatgaaatatgatgtaattattgtgggggccggtcctggcggaatttattctgcttatgagctgatgaagaagtgcagcgataagaagattgctgtatttgattccggatattcattaaagaagcgtcactgcccaatcgacggtgaaaaggtgaaagcctgcattaagtgtaagtcctgctctattatgagcggtttcggcggcgctggcgcattctctgatggtaaatataacattaccaatgattttggcggtactttgtacgaatatattggtaagaaggctgctactgagctgatgcagtatgtagatgacatcaacatggcacacggcggcgaaggcaccaagatgtattctacagccggaactaatttaaagaaagtctgtttacagaaccgtctgaagctgttaaatgcttctgtacgtcatctgggaaccgatatcaacctggttgtattaggccagttatatgatgagttaaaagagcatgtggacttctattttgagtctcctgtaagtcatattgagtgcctggaaaatggcggatacagagtatggagcaatgacaagtcttatgactgcgagaagtgtatcgtatctgtaggacgaagcggcagcaagtggatggaacatatctgtaaggaactggatatcccaaccaagtccaaccgtgtggatctgggcgtgcgcgtagagcttcctgcagtgctgttctcccatttaacagacgaactgtacgaaagcaagatcgtataccgtacagagaagtttgaggataatgtacgtactttctgtatgaaccctaagggcattgttgtaaatgaaaataccaatggcatcgttactgtaaacggccacagctacgaggatccggaaaagcagacagaatgcaccaactttgcactgttagtttccaagcacttctcagagccgtttaaggacagcaacggctatggcgaaagcattgcccgtctatctaatatgttaggcggtggtgttatcgtacagcgtttcggtgacctgatccgcggaagacgaagcactccaaagcgtattgaggaaaatacctttgtgcctactctttctgcaacacctggcgacttaagccttgttcttccaaaacgtatcttagatggcatcattgaaatgatctatgccctggataagatcgcaccgggaactgcaaatgatgacactttgctttatggtgtagaagttaagttctacaacatggaagtagatgtagacgagaacctggaaagccgtcacaaaggactttatatcatcggtgatggcagcggcgtgacccattccctttcccatgcatctgcaagcggcgtgtatgtagcacgtaagatcgcagagaacctggaaggataaataagataaactagcagtatatttaaatctccgacagtgcaggtatgaatatagtatctccattgccggagattttttgtttcaatgaaaggttcagaaaataagtatttaatgcagagtaagcaaaagataaaggattaagccagagccattattgaaactttatttacgctcatcgccattggatgttatggggtactcagcatgatgggattctaaggcagcccccttttatatcttggaaagatgatcaaaatgtgaccttgattttgcgtttttgctgtgctatacttctactcgttgcaaagcctgaaaaaccaaggtcttataaggctttcgccgattcccggcgtaaaatgaatcgagtgttcgtgaccttccactcgtaaaacaaaactaaaggagaattgaaaaatgaacaaacagtattaccaatcaagaactggctttattacccagagtgcgctgatcgcagccctttatgtggttttgaccatgatcgttgcgccgatcgcttttggtccgatccagttcagagtctcagaagtattatgcgtgctgccttacttcttaaccagtgcagttccaggcgttaccattggctgctttcttgctaacctgctctgcggtgcagcatcactggatgtagtgttcggaagcattgcaactctgattggagcagttggttcttactatcttggaaagaagaacaaatggctggtatgtgttccaccgatcctttccaacaccattattgttccatgggtactgcgctatgcatatggttctacagacctgatcccatatgccatgctgactgtagggatcggagagatcctggctatcggtgtacttggaaatatcctgttagtgacactggaacgtcattataaagcagtgctgtttgcaaagtaatattggaaaatattagtaaaatgtatcatttgtgaaggagaaagatccctctggcgtattttgaatatgccagggggatctttttgaatgcagaccttgttttttgcattaatgtgggtataatatatttataaattaaaataaacataaataaacatgaaaaatacaaataaacataaataaatacaaataaacatagatgtggaggaatacgtatgaaaggagaaaatccatttacactgacttttgggcagaagccggtagaatttatttcccgtacagatcagattggaaagatcataaatacctttgatatggaaaatccgtctaatatggtttatatgatcgccggggttcgaggttctgggaagacagtttctcttgcagtgataggagatcactataatgcaaaggaagactggatcgtattgcgtttaagtgtagatatggatctgatttcagatacttggatatcttaaatgggaaaatgatgggactatagacgatattttaccaaaatttgatgaagaactgacggtttatgcttatgaaaaaatatggagtgagttatcagaactggaccgcaaaatcgtttatattatttctcagggagtaaataaaacaggtgacatacgggaaagtttgggagtatcaccgcaacttttaaatacgtatcggaaacgtcttatggagagaggtgtagttgatggttcaagacatggggaactgactttggcgttgccaagatttgaagagtatatcaatatgtattgtgaagtgactatctgaatgttttaacaatccaggggattttgctgtattttgaactgaggagagagtatacgaaaaggcgatccggttatcgaaaccggaccgcctttttaacgtctctgcgtttgtggatttatccttctacaacttccacaatactaaagcccttctctttcaacatatcctcacagggactgtcaaggtgcatacagtatactctgtggcgttcttcccgggggatccatttctccatcttgccgtagtagcagtgggatggatttggtaaatcgtgggtgctggtgtcgtggtagatgcggccgatctctcctgcaaggaagcgggttctgatatcttccggcagttctgaggagtcgccgctgtagtaaatagtttctgttccatcacttaaaacatagccgtagcatttcatatccagtgcatgtttcacttccacgggaactgcagtcagtccggccgggttttcgggaagtgtttcatggtaatggtagcctaaaggtgtgatcccttctaatgtaagaagctgcttaatggtctcctgtggataaactacatgaatggctttgttaaagagacagtaaaaataggagatcagggttccaagacttcctacgtggtcggcatgcatatgagtcaggataacataaacatcttcaatggaagccaggtccagtttgtgataaagcacatcaaacatggtctctccgcagtcaataagataaagcgcttttccggaaagcatgtatgctcccgtattcttaaagggaggataaaaagcgctgccttttccggtaaaatttaattccatgcctttcctccttaatgggtattattgttacagttcagccatgatattttattccttgataccggcgcttacaaagctgctcataaactgtttttgagcgactaagaaggccagaagaagcggaacaatgatgataaaggctgcagcacacacattggcccactgcatgttagcctctttggattttgcgaaaatagcaagtcctacggtcagtgtacggttggtaggagagttggtcacgatcagaggccacaggtagttgttccagtggtagctgacagagataacggcaaaggaaagatatgccggttttgcacatggcatgtatacaccccagatggtctgccaggtgttggcaccgtcgatctttgctgcctcagccagtgcctttggaatggatttaaagtgctgacggagtaagaagatagccatggcactgccgtagaatggaagcatcataccgatcttggtgtcgatgagcttcagatcagacagagtcatgaagtttggtgtgatcaaaacgtcatttgggataatgatctgcataaagatcacagcaaataccagcgcctgtcccttgaaatccagaactgccagtgcataggcagccagggtggaagtaaagaactgtacggcaaaggtgcatactaccagtgtcagtgtgttgatgtaataggtgccaaatggaatggcattccatacatatttaatattatccagtgtgaacgctgttgtcgggaacagtgtcatatggaaggatggaacggaaaatgcggttccgatcagccagataagtgggatcagccaaagcaggcctaaaataacggaaaatgcggtgatcccggcaccgatcaaatgttttttctgcatggtgtaaggcctcctttagttgtactggatcttcttgtcctggcttaagaaacgaggaagtgctactaccatgagcagaagcagcataaccgttgtcagtgcagaagatacgccgtagttgaagtttgtaaatccctgctggtaaatgtagtacagaagcagtgtggaagcgttgtttggagcgccctctgtcataatgactacatgatccaccagcttgaagctgttggtcagagcaatggtggatacaaacaggaaggttggtgcaagaagaggtaaagtgatcttgcggaaaatggtccaggagttagcgccgtcaatgcgggctgcctcatttacatcggtggaaatactctggataccggaaaggaagaataccatcaggtatccggcttctttccagacgtacataaaggccatagccggaagaacggtcttcttgctggataagatattcataggctgaaggcccatgctgatgagcatctggtcaagtaagccgttttttgccatgtaaataaacatccagatacttgcaatagcgatcataggcataactaccggatagaaataggaagtacggacaaaaccgatgagacggcttttacggttgactaacgttgctaaaaacaggccaacgaccatactgggaacaatggtgatcaacgcaaaaaacagcgtatttcccattactttccagaaaagagaagatccggccagactgatatagtttttcagaccgataaattccggtgcgctcataccgagcttatattttgtaaggctgagccagatgctccgaaagaccggccatacagtaaaggctgccataaagatcagggaaggcattaccaacagccatcctatgagagtgtttcgcagttcacgctgcttttttgtatgtgttttcatcttttattccccatttatcagatttcgagagaacagtaaaaatatgaaacaaattggcgctgccgtgaagcacgacagcaccaacttcatttcaaaagtatcattttatcctactgatactcagacagaacttctgttgcctgttcctgagctgcgcttaatgcttcttcagcagttgcgtcaccagttactgcagactggatattgtcatttaagactctccagatctctgctgcgttgtaagtagtaagctctggcttggagatcgggatctgctcgtaagcgatcttagcctgaggcagtttgtcgtagtattctttcatgatatccagatcgaagcaggactgtctggttgctacataacctgtatccagtgcccactgtgctgcgcgctctggctcagtagcgaacttgatgaacttccaagctgcctgtacacggtcttcagagataccattggagatgtagaagtttccgccgccggtaggagctgcctgacgtgcatttcctggaaggaatgcggtaccgaaatcaaaggtagcgttcttgctgatgtttgccaggtttcctgtggtgtgatagatcatagctacttcgccagctaagaactgagtaggaagatcggtccactgtacgatgccaggagccattacttcgtacttgttctgaaggtcaagccagaactgaagtgcttctacgttctctggagtatcgaacataacggattttccgtcttcagccatcaggttctcaccattcttgctgttctgtaagcagaagcctgtgaaggtccactgtgcagaaccggagtttaatgcgataccaacaccgtaacggttttcgttggtgagcagttttgcgtcttcaaccagttcgtcccaggttgcaggtgctttctcaggatcaaggccaacttccttgaatgcatccttattatagaaaaggatctctgtacttctctggaatgggatggagtagatcttgccgtctacgtaggagtcctccatgaagccgcttaagaaatcgtcgatgtaagcttttccttcgtctccgtctgctgcgatcaggtcatctaatggcattgccataccggtggaagccattgtgaaacgctgggtagcaaggcttacgaatacatctggtggtgtgcctccctggatagcagtctggatctttgtaacggtatcatcgtagtttccggtataaacaggatctacaacgatgtcaggattttcagcattgaagtctgcgcagatcttctcaatcagctttgcagcatcgccgcctacgtttactgggtagtagaatgacaggtgcattgcgtcagatgaaccgccttcagctgctgcctcagatttttcagctgctgcctcagatttttcagctgctgcgctggtttcggctggtttggaaccgccggagcagccgcctaatgccatagcagaggctactaaacaggcagatgatgcaagtacgagtttctttttcatgatactcctcctttttgttcgcattgatagactttttaaggtctgtgatttgctcttaagttcactatagcatcattattgaaacgtgtcaaatattattttgttttttttgcacaataaatattttgaatttacatgttactttaacaattttacctatgctatacattttttacattttctttacagggaatacgattgaacaaggttcaatttctggggcagaattgtgatttcttaagatatatgttatagttaatacaagtgagagcagcaacgaaggtccggtcatagagtggacctgacagtaaaatgcagaccacaccagcaccgtatatcaggaggaacacatatggcaaccattaaagatattgcaaagaaggccggcgtggcccagggaacggtttccaatgtattaaatggtaaagggaacgtaagcagtgacaaaatacgccgggtaatggaagctgcaaggcaattgggctatgttccaaatgaaagagcagctttgctgcgcaagggaaccaatgactgcctggctctgatcatgccggattcccgggcaaggcagtatgaagatttttatttcagttttaaagactatgcccaggaacatggttatcttgtatcccgccatctgaccaatgaaaattcaccggaaagtgaagcgactgcattttcagaggcaaaagtaaagcaggtaaaggggatcgcctgcatttccgcagtagcgggaactgccagcgaggcggcgatctataaaaataatgggatctttggggaaatggaaccggcccagaataatggctcggatattccggtactttttgtagaccggaaaacaggtttcccttctgattttattgggtttgattatgaaaaagcgggacaggctatggcagagaaagcactgcaggcggggtatcgcagcatctgcctgcttacaggaaatccggattattccagtgaaaaggatttttgcaggggctttctgaccatgatggaaggttctacctgccaggtgatccagatctggacagactcatttagaaaataccagaatatcatgcagatatttaacggaacactgccccaggcattctttatatccaattatggatttgcagaaagtgccaaggatatgtgtaccactttttatggaaaagaagagggctcaccggatatctatacggtggcgccgctgtttaccattccggaaaatgactttattaaatatgaaatgaattaccgccagctaggaaaaagggcggcaaagatgctgatcagaaaggcagaggagtccggtgcggaagaaagcacagcacaggaaagtgcaacggaagaaaatacggcatcagaaaaaataccggataatgtcgggacagagggacatgccaattggatgatcccgggagacggatttcagaactggttcgtgaatatccgaaagccggaaagtacccagccattaaatattgtaactctggacagcccggaagcttatattatgaaaacgttttccagactgtttacccagaaaacgggaattgatgtaaatgtgtgcattctctcttatgatgaaatctatgaggcatttaactcgttagatgaaacctcccgttttgatatcctgcgactggatgtgacctggctttcctggtttgcccagaagcttctccggccattgtcagagatcgatgaaaatattgaaaacagcctgggacagtacgtggaaggagttccggagcattactgccgggtacatggtcagatctatgcgctgccggttacgcccagcgtgcagattctttattataggaaggacctgtttgaaagccctatctgcaagcggacctattttgagcagttccatgaagaactgcagccgccgaagacatttgaggaatataacaggatcgctgcatttttcacaagagatctgacaccctcatcaccggttccttatggatcgacgattacactgggctctaccggtgtggctggttctgagtttctggcaagattatttgccattcaggaaaacctgtacggtgcggacggacagatccatttagactccctgcagtgccagcaggctcttgcggagttagtacagctgcggcgttgtacatcgccggagtactgtggctggtggacccagactgcaaggcggtttgcagaaggaaattttgccatgtccattttgtacagcaactatgccagtgacctgtcggctcacagttcccatgtagtaggaaatgtagggtactctatgatgccgggaaataacccggtgcttggcggcggcagtttaggtgtttctaaatattgtaagcggccgaaggatgccctttcttttattaaatggatgtgcagtgagccgctttgttcagcgtcggctttactggaaagtacatccccatgccgcaggacctatgataattatgaggttttacataactatccatggctgaagcttaccagacactgcttccccattgcaaaagggaaccggcttccggcggagctttctgtaccctttgatgagcgtaagtttttgagcatcctgggactggcagttaagaatgcttataccggaattgtgaccccaaaagaggccctttccgatgcccagatgcagttttcaaattatttccatacttctttagaaaaacgttagaaatagtcagattttagtcagagttctttaagggagcctcaaagacttgcttatactgatgtgctatactataaccagtgaagagaaaaacaagcggctgcgaagcagacatttgtttttcacgagcggttaacgaagaccccgcctgcgatagcaggcagtagagcgcataagcgcgtgggtctgagcataggagagaaacccgcttgcataattgcgtgggcctgagtatatagcacaggagagaaggtgagcagatgaggacaaaagacaatggaaaatacaatatagcaggaaacaccgggaaaaagaagtgtgcagcgtttaactggcttaaaggagtaacagctgtgctctgtgcagtggctatgtattttgcagtgactaccggtatccgcggctatgatatgtataaggatgccattgcccaggtcagcctgaaagataaggtaagcgagatacggtccaaggaaagctatactgtattttctgatcttccggaaacgtatacggatgcagtcctctctgtggaagatcaccgattttacggacatattggtattgatcccattgccattacaagagccatggtcaatgatgtaaaggccggacgctttgtagaaggcggcagtaccattacccagcagctggcaaaaaatctgtatttcacccaggaaaagaagatggagcgtaaggtagcagaggtatttatggcttttgcactggagcgggattacagtaaaaatgagattttagagctttatgtaaataccatttatttcggaaacggatattattgtatcaaagatgccagcgaaggctatttcggaaaagagccggaagacctgacagattacgaaagcacacttcttgcaggcgtccctaatgcaccgtctaaatattcccccactgtcaatctggagctggcggaaaaacgccaggagcaggtggtagaacgtctggtagcctgcggactgtttacaaaagagcgggcattggagacgctggccggaagtgaaatgtaagtatgaaaataggatgtaaagagatgtgaaatatcacggcttgtaaaagaaagctatatctgctagaataagtgaacgactaattaaaatgagcgttagataccccctatagggtggaatctagcgctttcaggcgtgttttggaaaggaaaatatttatgtatatcatagcaggattgggaaaccctacaagggagtatgagaagacaagacataatgtgggatttgataccattgatgtgctggcggacaagttaaatacatctgtggatgagaagaaatttaagggactttatggaaggggcatcattgcaggggaaaaggtgatccttttaaagcctcagacttttatgaatttaagcggtgagagcgtaagagaagcggcagatttctataaagtggacccagagcatatcattgttatatatgatgatatcagtctggatgtaggtcagctgcgtatccgcaagaaaggcagtgcaggcggtcataatggtatcaaaaatatcattgcccatctgggaacccaggagtttccgagaattaaggtaggcgtaggtgacaagccccccagaatggatctggcagattatgtactcagccgtttctctaaggaagaccgtgagaaaatggaacaggcatttaaggatgcggcagaggcagtggaagtcatgatcgcagagggaccagatgcggctatgaaccagtttaatggacacaaatagatatcttgtgcataattgaacacagaaacgttgaaatagatacaacacagactgaaatgataatggaacaggatataaggggaaaacatggaaaatccgttattggaattacaggaatatgaaaatctacaggaagcgttaaaaaaggcaaaaggaccggtccaggcaacgggaacccttgattcccagaaggtacacctgatgtactggctgggaaaagacgggggttttccctggaaactggtggtgacttatgatgaccagagagccagggagatctacgatgattttcgcagctttacggaaaacgtatggctttacccggcaaaggatctgctgttttacagtgcggatatccacggaaacctgatgacccgccagcgcattgcagtgtggcggcacctgatggaagagaaggaaggcgtagtagtcactacgttagacggccttatggatcatctgctgccgctggtatttttaaagcagcaggcggtgactgtggaaaacggccagatcatggatctggatgaatggaaagaacgccttacagcactggggtatgagcgtacagcccaggtagacggcatgggccagttttccatccgtggcggtatcgtggacattttcccgctgacagaggaagtgccggtgcgtattgaactgtgggatgatgaggtggactccatccgcagtttcgacccggaaagccagcggtctgtggaacagctggaaaaaattaccatttatccttcagccgagaccattttaacaaaaaagcagttagaagcagggattgaacgtctggaaaaggaagaaaaagaatatgaagcagccttaagggccaaacatcagattgaagaagcatcccgtatccggggtattatcaaagaactgacagaagggatccggcaaggctggaaacgggatggactggatgcctatatccggtatttctgcccggagactgtgtcatttctggactatttcccggcaggagatactctgatctgtctggatgaaccggcaagattaaaggaaaaaggcgagacggtagagcaggaatttcgtgaaagcatgatccaccgactggaaaagggctatctgctgccggggcagacagagcttctctatgcaggcacccaggtccttgcaaagcttcaaagttcttatactgtaatgcttaccggtcttgaccagaagctgccgggcatgaaggtaaaggaaaaattcagttttgatgtgcgaaacgtcaactcctatcagaacagctttgacatgcttataagcgatctgacccggtggaaaaaagaaggttaccgggtagtcttgctgtctgcttccaggacaagagccagccgtttagccagtgacctgcgtgaatatgatctgcgggcgtattgtccggacggaacaggggaagaacataaagcggcgccaggtgagatcctggttacctacggaaatatccacaggggttttgaatatcccctgatcaaatatgtcatcattacagaaggtgacatgtttggcacggaaaagaagaaaaaacggcggaaaaagagcaattaccagggaaaagctattcagagtttctctgagctggcagtaggagattatgtagtccatgaggaacatggtcttggcatttacaaaggaattgaaaaagtagagcgggacaaggtcattaaggactatattaagatcgagtatggagatggaggcaatctgtatcttcctgccaccagactggaaagcatccagaaatatgccggagcagatgccaaaaagccgaaactgaacaagttaggcggtacggagtggaacaagaccaagacccgtgtaaaaggtgcagtccaggagatcgcaagggacctggtaaagctgtatgcagcccgtcaggcgcaaaatggctaccagtacgggggagatactgtgtggcagaaggaatttgaggaactgtttccatatgaagaaacagatgaccagttagatgccattgaggcagtgaaaaaggacatggaaagccgaaagatcatggaccggctgatctgtggtgatgttggttacggtaagacggagatcgcccttcgggctgcttttaaggcagttcaggacagcaagcaagtggtatatctggtgcctactaccattctggcccagcagcattacaatacctttgtccagagaatgaaggattttccggtgcgcattgacatgttaagccgtttctgcaccccgtcccagcagaaaaaaacgctggaagacttgcgaaaaggcatggtggacattgtgatcggtactcacagagtgctttctaaggatttaaagtttaaaaatctggggcttctgatcatcgatgaggagcagcgttttggcgtagcccataaagagaagatcaagcagttaaaagaaaatgtagacgttatgactctgactgcaacccctattccaagaacactgcatatgagccttgcagggatccgtgacatgagcgtactggaagagccgccggtagaccgtacacctatccagacttatgtaatggaatacaacgaggaaatggtccgggaagctattaacagggagctggcgcgaaaaggccaggtgtattatgtatacaaccgtgtgacggatattgatgaagtggctgcaaagatacagaaactggtgccggatgcagtagttaccttcgcccacggtcagatgcatgagcatcagttagagcggatcatgacggactttatcaatggggagatcgatgttttagtatccactaccattattgagacaggtcttgatattccaaatgccaacaccatgatcatccatgatgcagacagactgggactttcccagttgtaccagcttcgcggccgtgtaggccgttccaaccgcacatcctttgcatttttaatgtataagcgggataagcttttaaaagaagaggcggaaaaacgtcttcaggctatccgtgagtttacagaattaggctccggtatcaagatcgccatgcgtgacctagagatccggggtgccggaaatgttcttggagcagagcagcatggacatatggaagcagtgggatatgacctttactgtaaaatgttaaatcaggcggttctggcattaaagggcgaggaaacagaggaagagtcctatgctaccagtgtggaatgtgacattgatgcctatattccggctgcttatattaaaaatgagtatcagaaactggatatttataagaggatctctgccattgagacagaagatgaatacatggatatgcaggatgagctgctggaccgctttggggatataccaaaaagtgtggaaaatcttctggtcatcgccagagtccgtgcgctggcccataagtgctatgtgaccgaggttttagtaaaagaaaaagaagtaaagctgaccatgtaccagaaggccaagatcaacgtaggaggaataccggatctggtaaattcctatggcggcgccttaaaactggtaccgggagaagtgcctgtgttccactatgtggagagaaagcctaagggcattaccattgaagatatgctgtttaaggcagaagagatattaaagggattaagaaagctgcggatgtgagagtccgcagcttttttaatcagatgtactgtttaccggcacctgaatggattttacctttaccccttttacctttccaaggtctccggcaaaggagctgatctcattctgggtaccatggagcacaacactgactacggatacaccgtattccctacagggaactcccagtctggcaatgatcatagaggcgtggagatgaagtttttcattcataacggaaacagattgtgggtcacttataatgcagctgataacagctaaacggtcttccatgggtgggaactcctttcggtttgtacatgttgcggtgcttcttaaaaaagtataacacatgtttaactgtaaataaatggtaagtgtcttgcgcaacagtagtcctgaggctataatgagcataagcaaaaataacttactataatgcatgaatatacatcagggaaacggggaggtagctatgtcggatacagaatatggagcagcgttaaaacttggtaaaaaacaatatcaggatgcagtggcaaagggagaatacccgtatctgccggtgttggatgatgttttatcctatacggatattgtatccacagtaagccttggaacgatggacattccgctggcaaaactggtgggaaccaagactgcggaacggtccaattcctttgccaacaactttatgcctcttttgccggaacggtctgaatttgggatcaaatggttaaatctttacaatcatcaggtagaggacggaattcaggatcctattgtggcctatgaatttatgaaccggttctatgtccaggagggaaataagagagtcagtgttatgaaatacctgggtgcttacagtattcccggaacggtgacccgtctgatccctaaaaggacggatgatctggaaaaccgtctgtattatgaatttctggatttttataaggtttcttctaactgtgatgtgtggttcagcaaggaaggaagatacaaagaacttctgaaactgatgggaatgaagccggatcaggtgtgggaagaagaggaccgtgtatatttcagatctgcctatggacgctttgccaaagccttttccatggctcatggagaccgcttaaagcttacagagggagatgcctttctggtttatattgaagtttatggatatgacaatgtaaaaggccagacagaaagagaaatgtaccgggcgttgatgcgtatctgggaagagatccagctggccaacagaggaaataagatcgaactgatccaagatccccaggaagtagaggaagataaaaaaccggccatcttaaaatggttcctgcctcaggaagagataccaagcggtctgaaagtgggatttatctatggaagaacagcagaaacttcccggtggatctatggccatgaactgggaagaatgtatctggaacaggcattccccggaaaactgacgactatggtagtagatcaggcagatacagaggaagcggtggcggaggctattgaaaaagaggcaaaagccggctgtaccattatttttactattacttccaggatgttaggacagagcgtccgttcagcggctctttatccggatattaaattttacaactgttccattaatatgtcctattcttccgtaagcaattactatgcaagaatgtatgaggcaaaattccttatgggagcgatcgcggcagcactgtccagggaagacaggctgggatatattgcagagcagcctacctatggaatgttagctgatatcaatgcctttgcccttggtgcaagaatggttaatccttatgtggaagtacatctggaatgggccagaaggaaagaggcgcagcatacagaagatattttacatgaaaaagggatccattatatttccggccatgacatgatcaatccggaccatccgtccagggaatatggtctgtatcggaaaaatgaagatggaacagtgacaaaccttgctatgccggtatggcactggggtaaattctatgagcagatcatccgtcttgcatttaagagtacagaagagatcgaagccatgaaaggcaagaaagcagtaaactactggtggggtatgtcagcggatgtgatcgatgtgatctgttctgaaaatatgccaaatggtaccaggcggctgatcgagtttttgaaaaattccattcgtgccggcagcttccatccatttgacggactgatctatgcccaggatggaagcaccaaatgcacccagggcaagagcttaaatgcagaggagatcattactatgaactggctggcgcaaaatgtagttggctatattccaaagatcggggaaatgaatgagcgcgcccaggaactgatgcagcttcagggcattaaggcaacggagcagacagagatggagaatgaataaatgaacataatgatatttgctgatcaggaatcaaagctgttgtatgaatactatgacccggagcagatgaaagatattgatctgatcatttcctgtggagatcttgaacctgaatatcttactttttttgcaactctgtgccatgcccctttattgtatgtaaagggaaatcatgatacaaaatatgaatacaaaccgccggaaggctgcatttgtattgatgatgatatttttgtatacaagggagtccgtattctgggactgggaggttccatggaatatataccggactcacctaatcagtacacagagaagatgatgaggaaacgtattcataaactttggtggaagctgtggcgccacaaaggctttgatatccttgtgacccatgccccggcatataagttaaatgatatggaagatctgccccatcgcggatttaaggcatttttagacctgatggataaatatcatccaaagtactttttacatggtcatgttcatgctaactatggaagcggtttcaaacgaaaagatgtatatggtactaccagggtgatcaatggatatgaattttatgtaatcgaatatccgggagaaccggtagtgcctgctgaaaaaacagaggatacaaatgcataaaataaaaagtggtttccttgtaattttataattggtaagttataatttatttataaaatgatatgacatacgtgacgagacaggaagaggagtttatatatcatgtataaatatgagatgatcgcggaagagatacagaagaaaattaaagatggaacttacccgccggatacaagactgccacaggaaatggaaatgtgtaagatctatgatgccagccgtattaccataagagaggcaatggagcttctggtagcaaaaggtctgatcacaaaacgacggggtgcaggaacctttgtaaaagccgtggctccgggcatgacggaccaggtgggcttttcaaaatccggtcagttcagtggatttagtaaagaccaggcaggacggaaggtatcttcggatgtccatgaatttggactgaaaaaagcaagtaaagaagtggcagaaaaactgcaggtggcagaaaatgcttttgtctgctatatatgccgtaccagattggtggatgggaaaccttatgtagtagaatacacctacatgcctacggattttattacaggtattacggaagatgtagtaaaaagttctatttattcctatttggaaaatgatctgggcttaaagatacaaagtgcccatcggatcgccagggcagacatgcctacagaacaggaaaaaaagtggctggatataggtgatcaggtcctgcctgtcctggaagtggaacaggtagcatatctggatgatggacgtatttttgagtactctatttcccgtcacagggcagatcgatttgaacttaaaagcgtaagtattcattaaattttcagaaaaatatcaaaatcaatgtgcaaaacaaataaaaatataaaaagtaattgtgcaaagtgtcagtatgctgcaaacagcaaactggcacttttaaaatttcgcttaaaaacttaaaaaatacccttgcaattcttggaaaatattatataataacaaatgtcataacaaataaataattaaacataacaaaacgagaaaatgacatataaaaaagaaaggggtatgggcatggagcttaaaattccggaaaacttttttgtaggcgcagcaatgtcaggtcctcagacagaaggcgcttataaaacaggaggccgtctggaaagtatctgggatacctggtcagatctttcaatttctgatttctacaataaagtgggaagctatgtaggaaacaatttttatgagaaatatgaggatgacattaaacttctgaaaagccttcatatggattctttccgtacttccatgcagtggagcagacttcttacaaaagatggaaagctcaatcaggaaggagcacagttttaccataaggtatgtaaatgtgcgaaagaaaatcagatcgaactttttatgaacctgtatcattttgatatgccgacctatctgtttgaaagaggcggatgggaaagcagggatgtggtggaagcttatgcagcctatgccagagccgcttttcgtgagtttggttcagagatccggtactggtttactttcaacgaacccatcgtagaaccagatcagcgctaccgcaacggtttttggtatccttttataaaggatgcaaaaagaggaatgcaggttcagtatcatctgtcccttgcccacagtctggctgtatgggaattcagaaaggcaaaagaagagggctatgtaagagaggatgcaaagatcggcctgatcaactgttttgcgccgccttatacaagagaagatcctacgccagaagatctggaagctttgcggatggaggatgggatcaacaaccggtggtggctggatctggtggcagaaggacatctgccagaggacgttctttctacattggaagaaaaaggtctggctccggaaagaaggccgggagatgaagagatattaaagcagggaaaagtagactggctgggctttaattattatcatccatccaggatccaggcaccgaaagagaagacagatgaaaacggttaccctaaattttctgatccatatgtatggccagaagcaaagatgaatatatacagaggatgggagatctatccaaagggtatttatgattttggaatgaaaatgaaaaatgaatatccggatcttaagttctttgtttctgaaaatggaatgggagtagaacatgaagaccgtttcagggatgcatccggtgagatccaggatgattacaggatcgaatttattacagaacatctccagtggatctttaaatccattgaagacggtgcaaagtgtctgggatatcactactggggagtgatcgataactggtcctggaataatgcatttaaaaacagatatggtatgatagaagtagatcttatggggaattattccagaaaacttaaaaagtcagcccgctggatgaagggactgctagaagaaagggaggcaaaagtatgaaagaggtatcatttcaggagtcaaagtttgtagagaaatttacgatcttcgcatcaaaaatgggaaatgagatccatttacggtccctgcgtgatgcatttgctaccattatgccgctgtatatcctggcaggtctggcagtgctgatcaacaatacggtatttgtgtggctgttatccggcgatactcttacaggagcccagtactggggcactgtgatcacaaacggaactttaaatatcagctccctgctgattgcacctgtgatcggttattgtctttcaagaaacaaaggctttgataatcccatggcagcggcgattgtttcactggcagccctggtagttatgatgccaaatgtagtcagcgtaaccccattagaaggaggcgagagcgtagcagtatccggcgccttaacttttggaaatgtgggaacacaggcgatgtttgcgggcgttatcatcggcctgatcgcaacagaactttttgtatggatctcagggatcaaaaagctgcagatcgacctgggagacagcatcccgccgtctgttggaaaatcatttaacgttctgatcccgttcatcctgctgttatccggttttggtcttatatctgcagttcttaacaatgtatttgatacaaacctgatccagatgataaccactctgatccaggaaccactgcgtaccgttacaaccggcctggttggctgcgtgatcctttacagcctgggaaatttcttgtggctgttaggtattcatcagtctgttatctacagttccatcctggagccgcttctgatcgtaaatatgacacagaatatggctgcttatgcagcaggtgaagcgattcccaacattatcaatgtagctttggtacctggatttggtatgatgggaggttccggatctaccatctgccttctgatcgctaccttcttagttggtcgcaacaaagcaacaagaggcgttgccaaaatggcattcgttccgggattatttaacattaatgaaccggttatcttcggatatcccattgtatacaatatttccctgatcattccatttattttaactcctgcattaggtattattattgcatatgcagcaactgcaatgcattttatgaatgaatgcgtggtatatattccatggaccacaccgcctctgttaagcggatatcttgcaacagcaggtgactggcgtgctatccttgtacaggcactgatcctgatcttaggtgtgctgttatatattccttttgtaaagatcaatgatgttgttatggcaaaaacgatgggtgaagagtaaaggagaagatgaaaatgaagaagatcttattagtatgcaacgcaggaatgtcaaccagtatgctggtggcaaaaatgaagaaagcagcacaggcagatggggtcgaggttagtattgaagcaaaatccctggcagacgcaaagaaagagatccaggaagccaatattgtccttttaggaccgcagatccgctacgaactggaaaatgtaaagaagctggcaggaagtgtaccggtagaagcaattgacatgagggattatggcatgatgaacggggagaaagtgttaaagcatgctatggaggtgatgggataatggacgaaagcatggttatggtatgcatgcagatcatcacaaatacaggaagcgcaaaatcttcttacatagaggccattcagaaagcaaaaaagggtgatcttgggggagccgagatcagcatgaatgagggagatgacctttatgcccaggcacatgaagtccacacttctttaatacagaaagaagcttccggtgaaaaaacagagttttccctgatcctgatgcatgcagaagatcagatggcaagtacggaaatggccaaggtaatggcaagggagtttattgaattatatagagagatgaaggaaagcagataaggtatctgcgaataggaaatacccaggcgggttcgggaaacgatcgcctgggtatttttgacttttaatccatcatacccatccgttctctgtatattctccattgattttcaaagaaatagtcaacatcaggtaatggacgtacagggcgtcttgaggcagacggtgttccctcttttaaagttacttcctggacttcctggccatgcattttctggtccagtctgcagcgatataattctccaaaggtttggcagcctggaaagcctgggagttctcctgtggaatctgtatataatgcggaacctcggcttcctccgcctgcttttgcgtagtctaacatggcaaatagatacattttttgagaaagaagcatatcgtacagcttgtagaacaatgaaagttgtgaaacagaaggcgattttgctttttgcataaattgacatatgtcatcctctgtttcttttaaagctgtttccatttgcacctggttgcggatcatacctgcagcggcactcattcttttagaggcatttatccacagttcggacaatgggcagtttccttctgcatgttctgaaagtctgatccgatccagcgcctgaatgcgcagcctttcttttataccactctcggtggaagggctcgcttctttcatgtgtgttctttttttaagaaaaattccttcagccgcccggacagcacctacctgacctgcatttaaagcagttccgccaggtcttgtaactccatgacttgcacacacttctccgatcgcgtaaagaccagagagattggtttcccatagatggttggtggacagaccaccgttattatgttgggcacatacggcaatctccaaacgttctttaaacagatctacatggtgatcctgataaaaaagaatagcaggctcgttcatatgctttaaacgttcaatgggtgttccgaagcaggctccggcctggcttaaatattcttttgcttccgggatcatagatgcataaggaagatccctgtctttttcaaggtttcctggattgaccctgtaatccaaaaatactctgcgtttttttaatacagtctcctggtaaaccaataggtcgatcaccgaagagccgccaaaaattttatttacatcaaatggccattgataacctttcaaaaaaaccatagaaagcagatctggcagttcattaaaataatcaagaagaaattctttttcatcatttccgtcctggtcagtagaaataaagcttggaagtacctgcatatatgttccgcttacattccatcttggatttaaagaagccattccaaattgccattctgtcaggtttttcccagaagcaccagcttcaaatgccatacctgtggagccggtttgcgaaacgggatacacactgtcgtgatacatgccagctggtccgcctgttgcgaggatcacatttttacaccagatgattttataagcaggttcgctatgaatgtttttgtccaggcagaggattccctttacttggttcatgtatgtaaggatctgaatagcctgcatctgatccaaaattaggatctgtttctcttttacagatctttcaagggcttccgtcataagcttagaagtataaggaccggcactggtggctcttcttcctctgtcatgatctgttttatatcccataaattcaccgtgctctgtgcagggaaaaggaactcccagctctgtaagggcaaaaaaacaccgggcagaaagagccgcttcacataatgcctggtctccgtctacacattgtcctgcaaacaggtcttctgccatatttcttacgctgtcagcatcgtttcctgacaatgtaagcttataataagtctgcttgtctgaaccggtatttctggaagtacctgattttatattttctgttatgattgccagatctctttcaccgttttgatataagcgtaatgcggcctgaaatcctgctgctccacttccgatgataatatgtgtaatcgtttgttcagttagcttcatcttgtctccctttctgatcataagagatcacagtaaaaaacacccagaataatcagaaagaagatccgaaaactattctgggcgtttttatttttgacaaaaagatataaaaatgaattgcagatgtaaaatttagcaaagtaaagaacggacggtttcgccggagatcacttcaactggggtaaggacttttacaggcagacaactgccgttgtttagctgccatatcatatgcattaccgtagattcggagatagcttcgatatgtgtttccactgtagtgatccgtgggctgataatattatagtagcccagattatcatagccgatcacacttacatcgtcaggtacagtacgaccggttttgcagatggcattgatggctccagttgccaaacggtcattaaatgcaaacagggcagtaggcatttcgcctgtgtaagtgttgaaaaagttcaagcacaccttttcagctgcgtcataaagccaggagcctgtttctaagatcaattcaggaggaatagagagtccttcttcctggaaagcctggagaaatccggcggtacgttcctggttacttaaatagcttcgcacacctgccagtaaagcgacagttttgtgtccgtgttcgataagatatctgcctgcaagataagctcctttgcggttatctgataaaacagaaggaagcttgtcggagtagctgttgactaaaacacagggtattttctgactgacagcatattcaatgtgtttttgaacaacattacttacaaaaacgattccggaaagaccaagtgctgtaatcttatctgcaatattatcggaagcatccagtgtagtgtagatcagggaacagccgtttttctgaaaatcacgttccagtatattaaacagggaagagtaaaatggttcggttataatattttcttttgggaggaaaaaaccgatgtttttgttggtgataacttttggggactctggggcaaccgggacactgcttaaaacaatagtgccttttccggggcatttttcgatcagcccttcgtctgctaacatctgcattgcttttcgaagagtgctgcggttgacatcgtatttcagggagaggacctgctctgtggggagcaggcttcctaccttgtagacatcattcaggatatcatttttgatgtcattataaatcatggaataacgaaatttttctttgctcatattttacctaactgaatcgtttgttaatttgttgactaatatttatacataaagtatacatttaacattttaacatgttcagctctttcctgcaattcatgttttaaaaacctgccgatcagtctttcatagccagctcatatgctgctttcatcagttcctcattcagaggacgtggattgcaggtaatatgtccggtagttctcttgatcacatcgatcagataatccatgcttggttcttcctttatatatccctttaagcagcgaggagcatcgatggatttctgcagagaagtaattttgtctaacagagcctgtacattttctttgtcagaagcaccttctttgtatacgccgaatgccttggagatttctacatatttcttctctgcatattcctgattcaggataatggaagctggcaggaagatggagcatgcatcgccgtgaggaataccgtattcgcctcctaaaggctgagccatgatgtgagcaataccaatacctgcagtgatggcaacaccgccgaagtagcttgcaagcatcattccggctcttgcttccagattatcaggattgcggtaagcttcttccagatatttgtttaccagttcaatcgcctttaagccgtacatttcggtgataggtgttgcgtttaaggaaacgtaagattcaatagcatgacttaaagcgtccattcctgtagcagcggtaatacgtgcaggaagagctaaagtcaggcttggatccagaacaacaacatcagcaatcatggtgttgtgatacagactcttctttaagtggttgttattgttgataacaacgctggtcttagtagcctcagcaccggttccggaggtagttgggatagcaatgaacagaggtggttcaacggtaacagcttttcctctcatctgatagtcttcggtgtcgccgccgttaacagccagcataccgatcacttttgctgcatcaacaacacttccgccgcctaaagcaatggtacagtcacatccttctgcaacgtaaatatcgcgtccgtggtcaataatctgaagagttggctcagtctttacttcgtaaggaacaacagccataccggcgtctgttaaaagagaagagatcttcttgaaggcatcaaactcagcgctgaaagttacaaaaagaacttttttcttgttgtaccagtttaagatccccgggatctctgttaccttattttcgccgaaaataagacgtctgttaaaaaccatttcaaaaccatttgtgattgccatgatacatcctccttaaaaatgtgtttgttttgtttgttgatttgttgagatgtcagaagaatttttacatttgatagtatacatgttttgaacaacaaagtcaacaaaataatcaacaaattattgaaaatgttgcgaacatataaaaacatatataaagaagataaatgaacaaaacgcctataaaaggtggtgaaagtgagaagtatctgtgaaaaatataggaaatatgaggggaataatgggcgaaaaaagtaaaaacaactaaggggaacgaacgaaaatttaaaaatagttgacattaatattgacaacctattgaaagatatgtatacttagtgatgtaaacaaatgttgacaatgttgacaatatataaaaaggagtcaaggttatgagcgaatgtttctattgtgaagacggggaaaagagaaagagtttaatgatcgagatctgcaagttaaactattctacgatctacttaaacagaaatcagaaatatccaggaagatgtgttgtaaagctgaatgagcataagacagaatacttccagatgaccaaagaacagagagatggatactttgaagaactggcagctacagcaaaagcaatctttgaactgtatcatccagataagatcaattatgcaacatttggggatctggtacctcatgtacatgtacatgttgttcctaaatataaagatggtccagattggggtaatccatttgatgatacacagggaaagaaagaactgaccgatgctgaatatcagaagatggtagatgaattaaaagaaactatattaaaggaattaaataaataattttaggaggatggcaaaaatgaaaaaaatgttagcagctgctttggcagcatctatggttatgggacttacagcttgtggcggttcatcacagccgacagaaacaaaggcacctgaaagtgcaaaagaaacagaggcagcagcagagggaacaacagaggctgcagcagccggagatgaggaaaaaaagaccggttctgagatgacctggaagctggctactgacgcagcaaaagattatcctactacaaaggctctgatcaagtttgcggatgaagtttatgagaagagtaacggacgtattgcagtagatgtttacgaatcttctatcctgggtgatgaggtttcttatatggagcagctccaggcaggtactgttgacgtagctaagttatcaatcggtacattaagcggactgtatgaagatacacaggtattcttactgccattcctgtttaagaacaacacagagatgtggaaagttctggaaggtgatgttggtactaccattaaaaatggtctgaatgattacagcattcagggaatcggtttcacagactgtggaagccgctgcttctatactacaacagaagtaaagacaattgatgatttcaagggactgccgatccgtgtacagaacaaccagttaatgaactccatggtcagcaacttaggtgctaaccctgtaaacgtagctgcaaacgaagtgtacagcgcactgcagaccggtgtatgtaagggcggcgagaataaccctaacatcatcctttccgacagcttatatgaagttgctccttatgttctgatggacaaccatacaactactatggacgtgatctgcatgaacctggatctgtgggagtccttaagtgatgaagataaggcaatcgtagacgaagcaatggcagatgcaactgcatatgacagagaaatctgggatgcttctattgatgagtctcttcagacattaaaagacaaaggtgcaactattgtagaaccagatgacgcaactttagattccttcagagaggctatggctcctatttatgaagaatactctgcaaaatatgcaacactgttagatgccatcaatacaacattaggaaaataataagctggtttgataattttaaagagggtataggcgatgaaagaaaaaattgaaaatgcgatcgggcttgtatataccgtcgtagaagcgctctgccgactggtgctgatctttatggtatgtacagtaacagcgcaggtaatcagccgtgctcttggaggtaatatcaagtggtgcgaggaggtcatgctgatcctccttgacaccatgatgttcttactgcttccggtgggcataaaggatgatctgcatattcgtattgaagtatttgcgaaatattttccaaggaaggtaaaggtatttcttctttatttcagcaatgcaatactgttagtagtatctctttgcatgatccgttatggatttttcctgatggaaaagacaaattctaaatttacgattacaggtcttccaagaagatatctgtatctggtcaccgttatcagtggaattctgtgcctggtcatggttgttgcaaagttctttggtatgttccatacgaaatccacagacaatttcctggaatccaaaagcgagcttgaaaattaacaatggtaaagtgatgatagaaaagagggattaacactatggatacaaatacaatagccatgatcatactctttgcaacatttatgatttttatggttttgcgtgtacctgtaacattcagtatgttgggtgcctgtgttctgaccgccctttacctgggaccgaaatatgtatcatcggtattcctgcgtttgggtgacggcgtacagtcattctcatttttagcaattccgttctttatttttgccggtgatattatggcagaaggcggtatttcggaccgattggtagaagtggccaacgttatggtaggtcgtttccgcggcggtcttgcctatgtaaacgtaatcgcttcaaccttttttggtggtatttccggttcacctacagcggacgtatcttccttaggaccgatcgagatcggtatgatgacaaaaagtggttatgacaaagacttctctgttgcaactacagtagcaactgctacacaggctctgatcattcctccaagccacaacatgatcatttatggtatggcagcaggcggactttctacaggaaaactgtttttggcaggtatcggacctggacttatgttatgtgctgcaatgtgtatcctggtagcacgtattaccagaaaaagaggttatccaagaggacctaagtatacagtccgtgagtctttaaagattgtcagtgacggtttcctgggtgttatgaccattgttatcattcttcttggtgtttgtaccggtttatttacaaccacagaaagtgctgcaatcgcatgtgtatacgctttatttgttaccttatttatttacaagagcattaaagtaaaagatatctggagaattgcaaagaaatccttgggaaccctggctatgatcttaagtatcattgcagctgcaaatgcattctgctatctgatgagccttatgcaggttcctgcaaagatcacacagatgttattaacggtttctgataacaagtatgtagttctgatcctgatcaacatcctgctgctggtattaggctgcttcatggacgttgctcctctgatcctgatcgtaacgccgatccttctgcctgtagtaaaggcactgggaatggatccgatccattttggtatcgttatcatgatgaacctggcagtcggttctttaacaccgccagtaggaactaccctgtttgcaggttgtgcagtaggtgatataccgatcgaaaaggctacgaaagcgctgcttccatattatgcagttatggtagttgccctgttgttagttacctacatccctgcattttcaatgactcttccgaatctgttaatgcactgataaagcaaaggagaaggtatgataagagagtggaatgaagaatctttagatcatcgtaatgcgttgctgtatgcaatgggaatctcagaagaagatgcaaaaagaccggtgatcggtctggtaaattcatggaatgaaatgaatccgggacattttccttttgataagacggtcatccaggaaatgaaggatgagatctataaagccggggggcttgctctcgaacttcctgttacaggtatctgtgacgggatctgctccaatacaccaggagaccggtatactcttcctgcaagagatctggtttccagtgaagtggagatggttgcagaactgaatatgttagagggaatggtcattatggctacctgtgacaaggtagtgcctggtatgcttatgggagcattcagagtgaacattccaactacaatgcttaccggtggttatatggcagcaggctgctatgaggaccgtatgctgacactgacccacacaaagcaggcttatgcagcttatgtggaaggcgacatgagcagagaagaatacaaagctattgttcgccatgcatgtccaactccgggagcatgtccttttatgggaactgccaatactatgtgtgccatggcagagatcctgggattttccccacatggaaatgcgtctgtaagaagccagagtgagaaatggcatcagatggcaagagaagcagccagaaaagtagtggaggctgtgaaagaagagaaacgcccaagtgattttgtgacccagaagagtctggagaatgtagtccgctatatgatggcgaccggcggttctaccaacagtttgctgcatattccggcactggcaagacagatgggatttgatattacccctgagactttcgatgccatcagccgtgaagtcccgctgatcagtaccatttacccaaatcatccggtatataccatggaagaatttgaccgtgcaggcggactgggtgctgttgtaaaagaaatggtaaaagctggaaagattgatgcagacgcagacggtatgtttggaaccatcagacagaaagcagaactggctgaaaatatggatacagatgtgattcatccagttgcagagccgatcagtgagcagggcggtctggctgtccttcatggaaatattggtacagacagcgccattgtaaagtttagtgcggtagcagaatctgcatggatctttgatggtcctgctaaatgttatgattcacaggatgatgcatggcatgcgatcctgaaagatgaaatagaagccggagatgtagttgttatccgttatgagggaccaaaaggaagccctggcatgcctcatatggaaacctttatggcagctgtcttaggcaagggactgggagaaaaactggcccttgtatcagatggaagattttccggcgcaaccggcggactggctatcggacatgtaagtccggaagcttatgaaggtggaaatctggctttgatccaggatggagatatgatccatattgatatccgtgccagaaagctgacagtagatgtaagcgaggaagaatttgaacgccgcagaaaagactggaagccggtggaaaagcctgctatgggctggctgaagctttacaagaataactgcacttctgctcacagaggcgcaaccatttactgggattaatgttaataagtataatgtctgataaataaaaacaggagcatttaaacctaacttcccttggtttggatgctcctgtttttatgatgtatttttattgtagttttataattttggccagcactttggcagcttcgggttttctacccggaccggttccggataagtttcaccgtaaagttctaattctacagtttcaatgacctgtggctctacaggtttatttacttctactcccgggatcgggaaatctacgggaacggtctttacggctgcgatccggcggatctcattcataccggaaatgactttgccaaataccggataggttcccttatggtccggacagtcacgcagggggaagaagaattcacagcttgccagtcccgcttccccatatccgcccatgcagacacagcctggatgggagtcaagaggtgtaacatccgggttcagcgcaaattcatttgggatcagatactgaagctccttatggccaaatgccgtatagcttacatccacccagttacccggaacgatacgttcgatggcgtgatggtctaagtagccgtgggaagcagcgtagataaagctgtttactgtgtttggcgctgcttcgggcagcagttctattacaatatccgctccgtttgccatgtggagtgtagcttttgggtttgtcatggtgtgtcctcctgagatactttactgcttattcaatgatctgcaattccttcggataatggtttaatacttccacaccatcttctgtaaccagtaccaggtcttctacgcggacaccggtatcgccggttaagtagatccctggttcaatggagaagatcatgcctggttttgcttcccatgtgttagcggaggaaacatcgccgaattcatgttcggaaaggccgataaaatgtccaaggcggtggttgaagtttggtccccagcccttggctgagatcaggtctctggctgcagcgtcaagctggtataacggtacgcctggacggatctttgagatagcagtctcgctggatgctttggtggtctcatatacttctctgtgtgcatcgctgacagtcttgaaatagaaggtacgggtcatgtcagagcagtagccgtctttgatgcagcctacgtcaaagagaacgcagtcaccaggttttacaacggtatcgtctggagaatgatgtgggtcagcggcatttgcgccaaaggcaactaatggttcaaaggaataaccgtctgcgccaagatctaagtagatctgaagcatctggtcagctacttctttttcagatacgccttcatggatcaggcctttgaatttagccattgctttatcgttgatagcagaggaaatacgcatttttttctgctcttcggtatcttttacgcctctggtgatatcaacggccagagagccgtttacgaagcctgcagcggccttcatttccataagaggaagaaggaaacgtgcctttaagtccttgtctacgccaagaacagcatttttgtccagacgggcagcgacgatctccgggaccggatctgtgtcagaataccatactttttcaacacctacatcaccaggcacattgaaaaggtggtttaagaaatagtaatggtgtccgtcagcttttaaaagcagtgcataaaaacgctcgataggagccatggaaatgcctgtaaggtagcagatagacattggatcggtaatgagcatctggtctacgccctgttcttttaaggcagccagaatgcggtttgctcttgcttcgttcatgataatatttctcctttatttaggttataaacatatgacgccggggcttgcaaatagccttccgacgtcataatactttactataataatgttgtcaagcaaccttactttctgcatgcctgcacgcaggaaagatgagaaagattgccattaaaactgagttcttaattttggatctaacaggtctcttaaaccatcgccgatgaaattggcgccaactgccatagtaaaaatggcaagtcccgggaaaccggcaacccagaatttattgaagtaatctacaccatcagaaaccatcataccccattccggtgttggcggagcggagccaagtcctaagaagcttaaggtggagaacatcaggatcttgtttccgatgtctgtggtagccatgatcaggacggagctgacgctgtttggaatgatctctttcatcaggatacgcatccgggaagcgccaagggcttctgctgcattgacatattcgttttcctttacgcttaatacaacgcttcgcatcagacgtgcgtaggtaggccaggaaacgattaccagggcaaacatggtgttgaacaggttagaacccataactgcgttgatgatcattgccaggatcagggatgggaaagacaggatcatttcggaaaaacgcatcatcacgttatccagccatccgcctacataaccggccagcgcaccgtaaaaggttccgataatacctgcaatgataacagacagacaccctgcaagaagggagtaacgtccgccgtagatcacacggctgaaaatgtcacgtccgaagttgtctgtgccaaaccagtggatggcagaaggtgcctttaaacgcaaggacagatcctgtgcgatagggtcataaggagcaacaacaggtgctaaaacagctgctaagatccatccaagacagatcaaaatacccagtgtaaacaggtaattagattttaataattttttcagggaatggatcatggttaattgcacctcactcttgggtcgatgatgccgtagaggatatcgaccactgtattgatgatcatataatttaatgcgatcagcagtgccacgccgatgatcgccggatagtcagctgccataacagactcataggcaaactgtcccacacctggccatttgaaaatggtttctactaataccataccgccaaggaggtttccaagtcccagaccgataacggtcataaccgggatcagggcatttccaagggcatgttttaagatcaggcagatactgtttaagccttttgcctttgctgtgcggacatagtctgtagacagggcgtctaacaggttagaacgggtggttctggtgatcaggcccatggtaaaggctgctaaaacgatacttggaaggatcaggtgacggacggcatccatggcttttgccggatttccttcgatcaggctgtcgatcacatacattccggtaacggaagccggagcagagaaagaattgcttaaacggcccggtcccgggaatatttttaacttatagtagaagaagtacagcatcagcagtgcaaaccagaaggccggaatgctgacacctgttacggaaatggcccggacgatctgatctaagatactgttgcggcggatggcggaaatgataccaaacaggatgccgaaaacagaagcgatcacgatggaaaacagggccagttccagagtggcgggataacatcttgccagatcgtccagtaccggacggctggtacggatagaggtccccaggtcaaagtgcagaagatcacggatgtaatagatatactgcacgatgagcgggcggtccagaccgtgttttgcacggtaggccgctacgatctccggatcatttaaggctctctggcttaagtttgcaaccaccgggtcgccaggtatcatctttgtaaggatgaataccagggtggcaacgccgaacagcataactgccaaataaaccacacgttttccaataaatttcaactctcccatttggatctggtacctttctaaactatctgatgtaagttgcccccggcggcggtgccgcgggaaaacagcagattttgatattttgagtgcccttgttggggcaagatcatgctttatgcccccaatgggacaaatgcagattttcatgtttcagatgcccccgcaaaggggcacctggatttttgttttattactttacgttgatctcagtcagatcaatagtgtaggagtcaaaaatatctaccccatctaatctgctgctgtgagcaatatgagcaggagcctgagcaattacgatgaatgggccgtcttcatacattgcgtcctggatattttccagaacctgggtgcgggcatcattgtcagttgcttccattgcttcctggtacattgcagccagctctgggttcatttcagcagtccatccggctctctgtcctacagtaccgcctggaaggaattccagctgtacgttaggatcgctgtaatctacgccccagtacataacagtaaagccaagagttccgtttctgtaagcgtcgccgtagcctgctgcccatgcttctgttgtgatatttacattaataccgatctgggataagtcatcctttaccttctgagccaggtcagttaaaaggatgccttccatatccaggtcagaaacagtcatatctacgtcaaagccgtccggataaccggcgtcagctaacagctgctttgcttcttcgatgttagtgtagtcatctgggcgtgttcccttgcttcccataaatccgtcctgaatgatagaatatggagttaaagtgccgtcaccgcagatcatgcggattccggagtaatctaaagctttgcggatggctttctgtacatctggattggaaacaggtccgccgtattcttcgttcatgttcatcataacgaaaccgatcatctttgtggttccgtttacgatctctacattttcagcagatcccagttcctctaaggtatcatctgtcagatttaatgcaacatcaatatctccagtagacagagtcatcatctgggtgttagcgtctggctggatctttaaaatgtatttgtctacgttagtagaagtgccccagtagttcgggttcttttccagaacaacttcctcatcaggagtgtagctggtcaggatgtacataccgcttcctgcacttgcattgtcaaggaaactctgtgcagtatcagtggaagaagcatcttctgcgtcagtaccgccattttcctttacaacagcgctgtcaaggacagccagagaactgtaagtcagcttggaaagaatggcactgtcaggctgatttaagtggaagattacagtagcatcatccggggtttcaatgctttcaatggtatcgcagatgaaagaaggatttccctttaagttcttggtacggttgatgctgaatgcaacgtcagcagaagtgatcttattgccgcttgcaaaagtcaggccgtcttttaacttaacagtcagtgttaagccgtcctcagaaaactcgtaggtatctgccagacaaggctgtggtgtgccattattttcatagaatttaaacaggttttcatagcaggcatttacgatcagctgtgggtacttttcgtaaacataacctggatccagagtggagaaaccggaacccatggcaacgataacggtattgtcgccggtggcactgctttctgcctgggtgctgtcagaagaacctgctgcagaggtgtctgtggatgcctgtccgccgccgcatgctgtgcagcctgctgcaactgccatggagagggcgaaggctaagagttttttgcttttcataattaaatcctcctcttaaaatagtaaatattgatacagcttttgaaagctgtgatacagcaatattttatgtgctggttaaattcatttactggtataaatgacatgccacaaaatggcctttttcgatctcttttaactgcgggatctctttggagcagatatcgcaggcctttggacagcgggtgtggaacgggcagccggaaggcggatcagaaggacttggaacttcacctgttaagtggatgcgttctgtcctgtcatctgcgtcaacctgggggatagcagataaaagagcctctgtataaggatggtaacgcttttcatacagctggtcataagcggcgatctccaccatttttcccagatacataactcctacgcgatcgctgacctggtaaacaacgtttaagttgtgggagatgaagaaataagtcagtcccaggcgttcctttaattcctggagcaggtttaagacctgtgcctggacggatacgtcaagggcggaaactgcctcgtcacagataataagctttggctctaaagccagcgctcttgcaataccgatacgctgtttctgtccgccggaaagctcatggggataacggcttaaatgataggtgtcaaggcctactaagtgaagcagctcctcgatccttgcgtctacatccatggaaccggtcatatggtggatctggaacggttccataaggatctggcgcactgtacgtcttggattaagacatgcggacggatcctgaaaaatgatctgggctttcttacgcatctgttttaaggctttgccttttaatccggaaatatcttccccgtctaaataaacatggccgtctgtagccgggatcaggcggatcagggtgcgtcctaaggtactctttccgcagccggactcaccaactacaccaaaggtctcacctgcgaaaatatcaaatgaaatatcgtctacggcacgtactgtgccggatttcttgtcttttcctttaaaatatacttttacatggtctgcgtggaccagtacgtctttgcttttgttttcatcagccattggttactgcctcctgacttccattatctgcctgtgcgtagagccagcagcgtacctgacggtcttctccaacagaaaataccggtggttcttccttacggcagcggtcgcaggcttttggacatcttggccagaaacggcagcccttgatgcgctctaccgggtttggaaccataccttcaatagtggataatggtttgcgctctttggtgatccttgggatagcgcttaaaagtccctgtgtgtaaggatgaagcggttcgcggaaaatatccgctgtaggcgctttttctacgatgtggccgttatacataacaataactgtatcgcaaagctcacttacaacaccaaggtcatgggtaatgaacacaacagaggtgttcatttcctggttcagatcacggatcaggtctaagatctgtgcctgaatggtcacatccagagccgttgtaggctcatctgcgatcaggatctgtggctgacaggccaaagccatggcgatcattacacgctggcgcataccgccggacatctggtggggatattcataagcacgggcctgtggattggcaataccaacagcctgcatcatcttaatggcttcttccatagcctcttttttcttcattcccctgtgaagacgtaaggactctgcgatctgctttccgcagcggatgatagggtttaaagaagtcataggttcctggaagatcatggagatctcatttccacggatcttctgcatttcccgttcagaaagttttaccagatcctttccattatataagatctgtccgccggtgactttgcccggaggatttgggatcagctgcatcatagccagggaggacacactttttccgcttccgctttcccctacgatgcctaacttctcaccgcggtggagcgtatagcttaagtggtctactgcgtgtaccgttccggccatggtcttgaattccacacacagatcttttatttcaagtaatgtttctgactggttcatggttttctctcgtttctacaggattttattaataaacgaacatattatccgactactatgctggatgttagcaatacgtttgtcagtttaaagcgacaaagtatcaacgcaaaaaaaaataactatatatagtacagatacaattgttaaggcttagaataccatattttctaaggaaattcaactggggaaatgatgttcttttgatatttgttcatctattcttcattgaaaacaaacgttagtctggtataatggtatcacatagttacaaacgaagaatatttaattttatgaggtttacatatgaaacgaaaaacagaccgggggagaatgaaatttcgggcgtttatggtctgcgttctttcttttctggtcgttacaggcagtgcctgttttttaaaccgggaacaggaaaaggaagaaaaattaaaggctgtttatgcagcggagtccacagtaagcagggtaaaatcccagttgaaccggtatctggcggagtcagaactggtgaaaaatatcatagagtcaggatatgatattgatggagaaaaattttccattttatcccagatgatgcaggataagcaaaatgtgatcgaggcccatgaactggcaaaggacggtattgtttcccatatctatcccatgaaagggaatgaagaggccatggggttaaatatgctggagcatccggacagaaagaaagaggcaaatctggcaaaaacaagcggtcagtataccattgcaggaccgtttccactggtccagggcggaaacggcgcactgctttttgatcctgtttatgtaaaagatgaagcaggggaagatacgttttggggcttttccattctggtattaaactgggatcattttatggaagaagtggaaacatataaactggaagatgcgtcctatcagtatctcatatggaaaaatggcacagaactgggagaaaagctgacgattgcccagagtgaaaaattttcctttaaggacacactggaagtagcctgtgatgtgcctaatgatacctggtattttgagatcgagccaaaagccggatgggtaccgcagtcacagattgcttttgggatactgatcgcagcccttgtttcaggagtgttgacggttggttactggcagtatgagatgcagcgttataaagaggcactgtatgcggaaaagatcgaacgggcagcaaaacgggcggaagaagcaagtgaagccaaaacaagatttctctttaacatgagtcatgatatccggactccgatgaatgcgatcatcggtttttctgatcttttagagaaacatctggatgataaagaaaaagtccatgattatattaagaagatccagttatccggttcgtttttattatccctgatcaactatgttctggaaatggcgcggatcgaaagcggaaaggcgacattacggacagaagttggggatgcccaggaactgttaggggcattaaatgcagtttttgaaccggcagtggagaagaagcggctgaaatacaactgtacgttggatgtagaacacaggtttatcatctgtgatgtgacaaaagtgcgggagatcgtattaaacattatcagcaattctgttaagtacaccccggaaggcggcagcgttacagtacagatcaaagagatcccatgggagaaagagggatggactgcataccgtattctggtagaagatacgggaattggcatgggtgcagaatatctgcctcatatttttgaagaatttaccagagagcggaccagtacggaaagtaaggtagtaggtgccggtctgggtcttccgatcgtaaaagccctgatagatcttatgggtggaacgatccaggtagaaagcgaaaggggcaaaggcagcaagtttgaagttattttgccttttgagatcgcttctgaggaagaggtcaaagacagcaagtttgaagttattttgccttttgagatcgcttctgaggaagaggtcaaagacagttatgtaaagaaagaagaaaagctgtataacagatctaaggagaagcgcattcttcttgcagaagataatgagctgaatgcggaaattgccataaccatactggaagaaaatggatttaaagttgagcgggcagaggacggatgtaaatgtgtggaactgttttcagaaaagccggcaggttattacagcaccattttaatggatatccagatgccaaatatggatggctatacagcttcaagaaagatccgtggcatggaacgggaagacgcaaaggcgatcccgattattgccctgactgccaatgcttttgatgaggaccggaataaggcgtttgctgcaggtatgaacggacatattgcgaaaccgattgatgtggggaggatggtcagatccattggagcgttagtaaaataagtgttagtgagataaatgtcagcccaacagaaaaggatattgtcaggcggtataaaaacagtctggcaatatcctttttagtttccatgcatttgcaagaagctgccggtggcaggttctgtaaatgagggtgtaagttatatgagttacatgatcaaacttaaagcggcttcatctgcgatcacggttacatcattgtgcagctgtaagatagatgccggaacagatggtgtaatagggccatagagagagttctttaaggcttctgccttttcctcgccgcctgcgatcagcaggatcttctttgcctgcatgatgtttttgatgcccatggtataggcctgttttggaacgtcatcttcagaggcgaagaaacgtttatttgcttcaatggtgctttctgttaagtctacacagtgggtctctttttcaaaagcagcgccaggttcgttaaagccgatatgtccatttcttccaagacctaaaagctgcagatcgataccgccgtgggagcggatgatctcattataggcagcgcaggctttctgtggatccggctctaagccgtctggaacgaaggtgcgggccttgtcgatatttacatggtcaaacaggttggtgttcataaaatagcggtagctctggtcattgtccgggtcaagtcctttgtactcgtccaggttaatggtggtgactttggcaaagtccagatcccccttgttgtaccattcgatcagctgtttgtaagtgccaatcggtgaagaaccggttgctaaccccaatacgcagtccggcttcataatgatctgggcggaaatgatgtttgcagccttgcggcttaagtcctgatagttttttgctttgtagataaccataagtgtgtcccctttctttgttgcttctccttatgataccagtatacctggtttggcgggaaattcaatagaaaggaggcaagaaaaaaactgacagggatgtagaagtatggtatgctaggaaagagtgaaccatctgcgtcagcagacataaaaaacgtgccagcgcagggttcataagtctataataaccaccccaacggaggattaaatcatggaaatcacaggacgcaatgtaggaaagacatgccgcacccattataaaggtacttttaatgatggaacccagtttgactcttcttatgacagaggcgaaccattagagttcgtatgcggcgcaggccagatgatcaaaggctttgacgcagcagtggctgatatggaagtaggagaggtaaaggatatccatctgatgccggaagaagcatacggccagccaaatccggacgcgatctttgaactggagatcgagcagcttccaggttctgaggatctgactgtaggccagcaggtatatctgaccaatcagatgggccagccattccctgtaaaagttactgcaaagacagagaagaccattacttttgacgcaaatcatgaaatggcaggaaaagagctgaactttaagatcgagctggtagaagtgaaataataaaaatttaatttctggacggaagtaaatatagaaagcagcagtgtatattttacccgcatttccacatactacccataagacacacaatatggaaacagagatgttttgtggtatgcaggaggaataaacgttatgaaagctacaggaatcgtaagaaggatcgatgaccttggacgtgtggtgatcccaaaagagatacgaaggaccttgcgtttgcgggaaggaacacctttagagatatttacagaccgtgagggggagatcattttaaagaaatattcccctatggtggagctggctgcttttgccggacagtatgcagaggccatgtcccaggcaacgggcctgatcgtgtgcatcacggaccgggatcaggtgatcgcagtatccggcggtgccagaaaagaactgctgcaaaaagccatcagcccttccctggagcgggtgatcggtgaacgccaggtcgtgcaatccggaaaagatgaaaaaagctttgtccagctggtagatgaagaattagaaggtattaccgcccaggtggtagcccctattatctgcgaaggcgatgcaatcggcgctgtagccattatgagccgggagccaagagcgcggtttggagaaatggaaatgaagctggctgccactgcctgcggatttttaggacggcagatggaaagctgaaacaaagaaatatggatcagtaataggaataataggaacagcaatgcaaaagcccccaggcaaaacctgggggcttttggcaagagaaaaaagttaagtacctaatatgagaaagggcagtcagtcccttttcatcagattaaaaatgtacagaaggtttcagagaatacgcagcagaagaagactgccacatatccaatgaggaatgggatctctgcttttgcaatatcgcccattttcagaccggatacggtagaagcggagaagatgtttactgcaaccggaggtgtcatggtaccaactacgttggagatgcacacaatcatgccgaagtggatcacgtcaatgcccatactctgggcaataggccagaggaccggtactaaaagaacggcaatcgcggttccttccatgaatgtaccgaagatcagcaggataatggcaactacgaagcagaacagcgcggaatttaaatgcatgctgataactgcgtttaccagtgcctgggaagcgcctgagaaggtaaatacccaggagaaagcggtagaagctgcgatgatgaataagatcatggcagagcttttcgcggaatcttttaaaatggggaccagttcttttacagtcagttctttgtagatgaacagtccggcaatggcagcccatacaactgcgatggcagcactttctgttgctgtcagcataccggagtagatgccgccaaggatgatgatgggggtcatcagcgccgggatggcatctaagaagatcttaaagatctcagaagggctgcgctttacagcctgttttggccagttttccttttttgcgtaaaagagaacttctgtcattaatacaagcatgatcacaataccgatgagcatgccctgtttaaacatgtttccaacagaagcgcctgttaaagtacagtagatgaccatgatgatagatggggggatgatcggtccaagaccaccggatacaactaacagtccggctgtacggtcacctgggtagccaagctttaccatatcattgtagagcatggtaccgatagcaataacagttgcaggagcggaaccggataaggctgcgaagaatgcgcaggctaaaaccagtgccaggctcattccgccgcgcacattgcctaccaggcagttggcgaaatttacgatacggcgggagatgccacctttggtcatcagatttccggcgagtacgaagaaagcgatggccataatggaagtagactgcagtccgccgaagatacgctgtgcgataacggtggaggaagcggacagaccgccgaatactacggagcaaagggaagccactcccagggagatggaaaccggaactcctacaataagacatacagcaaacgctgcgaaaaggatgatacctgcactcatgcttctgcctccttattctttaaatcgatgatcttttctacgaggatcacagtctggatcagtaagatcagtccaaaggtaagtaccagtgagaaatacatggcagacatagggatctttaatacaggagttgtctgaccagtctggatctgttttaaaaataaggcggtgccggcctttaacataacagcggtaaagacctctaacacgatctgctcaacaatggataccacttttttggtgactccgtgaagcttttcaataatagcggtaacagcaacctgcgtgccgtcacgaagacctacttctgtgcctaacagagccatatagatcatactgtacatggccacttcttccgtccatggcatggaggctttgataaagttgcggttgatgactgcgacaaagtaagcggccaccatggcaataaatgcaatgatcataatggcatattctacttttgtgacataggacagcagctttttaatacctttcatagttccctctccaatctcattttccgacctctttcagagcatgttttcagttgtctgccagcagatgattttgatgcaaacattttgttgcagttcagtcatgacatcttcttgtttccatgttcatgaaaacaagaagcatggtggttcaccatatgctgatttgtatgagaaagcgcttatgcaagcaggcttgcaacacactttttcatacaaaccagcgcatgactgaactgtaacaaaataataagatgtctgatgtaattaaaataccacatcagacatcttacgtcaatgtattatcagaaaattaacacgattttaatatcaaaaagatgatattatatttattaacgacattttaacaacaattaatattgttttcaaacaaatctaattgctgctgccattttgtatcagccactgtgtaaaataatttcggatcacactgaaaggtgccggacctatatccaggagaaagcggttaaattctaacagggagaagttggctcccagtctttgctgtgcttcttctctcatatttaaaaattccaggtaaccagtgtaataggagaggtagttggaaggattttccactacttcatagtaaatggaagagatgacagaaggatcatcgatctggaagtacatagtcagataatcatttacctggtccatatcccagccctcgtagtggatgttaatgtccaacagggcataaagggcaagtgtaaaggcggcattgtgctgcaaaagttcacctacctgctcctccatgccatgatccagtgtgtaggcgtagtattccgcataagtaccccagccttctacatatccctgaaaatcaaggacattccgcaggttacaggtgttatgctggttaaagtaattggtctggtacatatgtcccggataaccttcatgggccatggtggtgtagagggagccggcatctgtactctggttattaatgtaaatggaattgtcttccggccggtcaataggtactgtaagatagaaagcagggcttaaaaagccttctaatgtttttggcacatttttaatggtatagttacagtcatttacaggcgggaaatctgcctgggactgggctttcagatcctctaaaatgtccttaggttccgtcagggtaaagggggaagagtccagtttatcgcctaaagacggatcatcgcttaacagctggttcacggctgccagttcctttgacatctgcttgttaatggcctgttttaaggcagaaacatcactgtaggaggttccggtgctggcatttaccagatattcataatatttccggccttccgggtagtagtaaagtcccttgtcattggaacctgttccttttaaactctccagaccgctgatcagccgttcataggcaggtacgaaatgttcgtcgatggcttttttattttttgccttataatcggctttttcctggtctgaaagaccgcccatttcatctaaacgggaagaaaaagtctctgccataaagctgtggtctgcgtcaataagataagcattgcaggagcggatgatattgtcgataactgtatcacacatgccaagatccgcctgggcccgctctgtctcaaaggcaatgagagagtcataataggcgtcaatggatgacaaaagagacaggtaatcatctacatcctgttttctgtaaaaagtatattcagataaaaggatagggagttgggactggatgccaagggtggtggataaaggctggtcatacagctctaatccatcagaggacagaagagtattaatgtaggaagaaagaatggtataggtaagcagctggtctttggataaaagacgggtatccatagcttcaaggtctgctttgatctgttttgcctcttcaaggtcctttcgtgtatcttcagcggaagctgttccaagagtgcggtcataatcggtaatgccgtaactttccgggtctgcaagtgtatagtgaagggtaagaagggactgggaggcttcctgtttaaacaggttttccgtgtactggtcaaaggcttcccgggctgcagccagggctgcttcgtctggctgactggcggagtcgtcagaagagttttcagttgcttcttctgcaatggtttcctgagaggtatttttgtctgctttcggtgcagaatttggaaaaagtgagcagccggtaataaggcacagggataacaccagtgcaaggatggcatgcagatatttttgtgttctctgtttcataaaaatctcctttttgggatacaatgatcgtccatgataccggattgctacgtgctttgcactctagcatcggattttagaccttttgacactggtgtcattatatattatatgtaggaaaattacaacgtatgtggcatagggcgtcttgacgaaagccctgtaaacgcttatacttacatcattagaatgctccaaaagggggctggaaagagggatttaaaatatgtgtcaggattgtaagaaaaaaccgtattatattacaactgccatcgcatatgcttccggtaagccgcatatcggcaacacctatgagatcgtgctggcagacagtattgcaagatataagagagctcagggatacgatgtgttcttccagaccggtaccgatgagcacggacagaagatcgaggagaaggcagaggctgcaggcatcactccaaaggagtttgtagataaggctgcaggcgagatcaagcgtatctgggatctgatgaatacttcttatgataaatttatccgtaccacagatgctgaccacgaagcacaggtacagaagatctttaaaaaactctatgaccagggagatatctacaaaggtgcttatgagggactttactgtactccatgtgagtctttctggactccatcccagttagtagacggcaagtgccctgactgcggcagagaggttaagccggcaaaggaagaggcatatttcttccgtatgagcaaatatgcaccgcagctgatcgagtacattaattctcatccagagtttatccagcctgtttccagaaagaatgagatgatgaacaacttccttcttccgggacttcaggatctgtgtgtatccagaactacctttgactggggtattccggtaacctttgatccaaagcatgttacctatgtatggctggatgcgctgaccaactatattaccggtgtcggctatgactgtgatggaaacagcactgaccagtttaagaaatactggcctgcagacctgcacctgatcggtaaggacattatccgtttccatactatttactggccgatcttcctgatggctttaggcgtaccgcttccaaagcaggtatttggtcatccatggctgcttcagggcgatggcaagatgagcaagtccaagggaaatgttctctatgcagatactctggtagatttctttggcgtagatgcagtacgttacttcgtgcttcatgaaatgccatttgaaaatgacggcgttatctcctgggagctgatggtagagcgtatgaactctgacctggcaaatatccttggaaaccttgtaaaccgtaccatttccatgagcaacaagtactttggcggcgttgtagaaaacaagggcgttgcagaagctgttgacgaagacttaaaggctgttgtattagaggaagtaaagaaggtagacgcaaagatggcccagctgcgtgtagcagatgccattacagagatcttcggtatcttcagaagatgcaacaagtacattgatgagacaactccatggactcttgcaaaggacgaggctaagaaagaccgccttgcaacggttctttacaacctgacagaggcgatcaccatcggcgcttccctgttagagtcatttatgcctgagacttctgagaagatcctggctcagttaaatacaaagaagagagagctggatgaaatggataccttcggtctgtatctttcaggaaataaggtaacagacaagcctgagatcctctttgcacgtatggatatcaaggaagttatggcaaaagtagaggaaatgcgcgcagctgcagcagaagctgcaaaacctgcagaagaggcagctgaggatgatggcattgacttagagccaaaggcagagatcacctacgatgattttgcaaaactgcagttccagatcggtgagatcgttaagtgcgaagcagtaccgaagtccaaaaagcttctctgctcccaggtaaagatcggaaccaagacccgccagatcgtaagcggtatcaaggctcattactcaccagaggaaatggtaggaaagaaagttatggtagtaaccaacttaaagcctgctaaattagccggagtcgtatccgaaggcatgatcctgtgtgcagaagacgcagagggaaatctgtccttaatggtaccggaaaagaagatgccagccggagctgagatctgctaatgatcagtaaataaatgtatttcatgtttgtaatagtagaaatttgggcgcatataattgaaatataaagagataaagggagagggaaaatattcccctccctttttcgcgcatatactggacattttaagagaaaactgctattctgaatataagcaggatttcaaatatattctaaatattctatatttctaagctgtatccaaaacagcatcttatctgaaactctttgcttaaatcacaaaccaatgaaacaggcagagagtacagagaaaactttctgccgactaacagaaaggacgatgcctatgtcaaacagtgtatgggaaccggaaataaccgatcatgagatgtagctggaaaatagggagtttaatctctgtgattttgccttatttttatctgttatgaaaaacaaaacagcacacagaaatgttttaagtattataacaggggaaaaaaatttaaaactgaaggaagtatatgtagaagaggtgatcctgaataagagcgggcagcgggcaatccgtttagacgcaagggcaacagacatttcaggacgcaattttgcaacggaaatgcaaaatgatacagagcaggatgatatgcggcgcagggcgagattttatcagggactgatcgatacgcctttattaaaatcgggaagaaagacccggtataaacatctgccacctacgatcattacatttatcacccagaaggatatatttggaaaagggctggcaaaatatacttttacagagcagtgcgaagaaataagggacttgcatctggaatatggaactaaaaagatatttttaaatatgaccagcaaaaagggagagcctgtattagtaagcctgctgcagtatatgaaacatacgactttggaaaattctgaaattttagtaaaagatgagcgcatagcgcaattagatgagattgtgacagagataaagcaatcagaagaatgggaggctgtaaggatgagcattttatctatcggtttggaacgtggaatgaagaaaggagtggcttggggaatagcgaaaagtattttggatatacttgaagaaactggtcccgtatcggagaaaacccgtgaaatgatcttgactgaaacagatgcagagcgtctaagcgcatgggttaaaaaggcagccagatcgaattcggaagaggattttttaagtaagatttgatgtgcctaaaagaaaaataagtgacatagatttacgcaaaacagccccacgaaaggggctgttaagtttgaagtatgtgttgaaagttatcaacaaaatctctttacagtcggaaccagcactttctgcataggtttcatcacttttccaactaacagggcgcacagtacagttccttcccgtattccctgaagttctccaaggaaaacaaaacacaggacaatacctacaacaactaccgtacaatccaggatcacttttacttcatgaaaggcttttttaggaaaaacagttttattcatggctgcggtaaggccttccataggcatgacgatcaggtcggtgtccagatataggcagatgccaaaagcaacgaggaaaatactgatggcaagcattacaagccttccgggatagccgggaaggcagaagcttccaagaagggtttctgtcaggtcaacgaaatatccaaaggcaaaggagcagagggtctgggcaagatccagagggcggaaagcctttcttaaaagcaggatctggatcaggatatagccgataaagataacggtcacacaggttccaaggtcttttccaaggatccggcttaccacatagggcagtgaattgaccggagatacgcccagattggaattgacggaaaatgcaactcccagggcaacgaaaaacaatccggccagatagatcacaatacgttttacaaatttcatatacaaaccaccttataaaatacagggccccaaactgtacccggactggcacagatgggtccctgtttgtcagttactatgtaatatttcaggagagaattatcagcaataagttttaatggtttccagcaggctatttcattaacagtggatacaaaaatcccagccatacgaccatcaaagcaccgccaattcgtgtagagatagaggcaaatgccagaaggttcatacggtcagcagctgttaaaacagccagatccccgcttccaccgatgttacagcagcaaagacctgcagttacacctgcttcgtaagggaacagccccgccagtttggcaaatatcatggcaccgataaaagcacccaggacgccaaagaagataacggcaaagacaccagggctgaaaaacttggtcaggtcggtgatctttaaggaattgatgccaattcctgcaaccagcataggcaggagggcttttaaggcaaaattcatggagtaaacacaattatcagctatatcatcagaaagaatacccgtacatttaattacaatcgcgataataatggaccatgccaggccggcgatcacgctggttcccggaagtttgcctaagatatcacctaagaggtagatcaccagtgacataaaaatgccacttcccagttttttgtagtcggcactggtgccggcccgtttttcttcttttaattcttctgcgctctggcttaccagtatccttccgccaccgttccagccgctcattttagcagttacagcgccgcctacagctgccatgagcactgcaaggatattggcgatagaagcgtagcagaggaattgtcctgccataccggtcatgtcctgtccggataaggcgctgtacagagaaggaagggtagtaatagcacctgcggaaccgccggacatacagggagcgccgatatagaaaagaccttcttttgctccaaaaccagtaatggcaccgccgatcatacagaaaccaagagcaaagacctggcttccgatgatggttggcagatagcgggcggttgcgcttaagatcagtttccggtccattacaagaacagatccgataaggagcatggcaacgtacatatcctggaaaccgcccttcatgaccatgcggacaccatttgctaaaggttcaggtaccagtcccagataattcatcaaagaggcaccaaggagtggcagaagacaggctccgcctaaatagttatttaaaataggaatggtatttccaagccagaaaaagacaccgcctactgccataagaaaggctacagacccgacaaatgtagttgcagtaaaggcacctgccgaattggaataaatggtcacagtaggcataaatcccagataggcactggcaaaaacaacggcgaaaaacagtacaaaatgcttgaatgaaagtccgcatacatcaaaattgatctttttacggttggaattgcgtttattatgttcttcgctgacggaaataccgaaaccaacatagtctacaccggcagctaccgcatcatctacaccacgcttatttaaagcaaggccgatggtttgacatcccttttcttttgcataaggctgtaccagggcaaccaggtccttggcatttgccatttgtggaacggcttttggattaacgaaggaggtaacctcgatcttatcagcgccggcatcgatcatttttttcacatattttgcttttacctctgttgggatgatcatagctttatggttctgccagccgtctcttgggcctacttctgtaatttcaattctttttggtaatgacatatgggttctcctctctgtattggatatacgatccagttcctgttatcattaaaagcaaaaatgatgccaaattgagaaaaataagagaaaacgtgattgttccagtatatgtgggcgtaagatgaatgggaaaaatggtagaaatgcaaacttttatttacatcagtttacatttgccggcgagctgcagatagatatgacgtattttctgccatccagaagaaatgttaaattgacaggggttttatttcaggtataatattttgtgaaacgatatacaaagatggaaatgtcgaagaaatttggcaggatacaaagaaattttagcagcataagcaaacacaggaggaacgatcatgcgcatcagtttggaacaggcattggatatccttatggatcatgtaacacagggaagaacagaaagaaaacctttggaacaatgtctggggctggtactttcgcaggatgtatttgcgttacttgatatgcctcctttcagtcggtctgcgcaggatggatatgcatttcaggctaaggacagcgctggtgcttccaaagagcagccggtggaattaaaggtaacaggaaaaatatatgccggggatttttcagaggcagaggtaaagccgggagaagcgatccgcatcatgacaggagcaatgattcctgtcggtgccgactgtgttctccgacaggaagatactgatgaaggagaagatgcagtccggatctacaaagaagtagaacctggttgcagtatctgctttaaaggagaagagtacaaaaaaggtcatattctgctccatgcaggtactaagatcgatgcggctgctctggcagttgccagtgggaatggtattatggagctgcctgtgtatgaacgggtgagagcggcagttgtttcttccggcagtgaagtagtagagccgggaacacctttgacgcctggaaaaatatataatacgaatactgtatacatgaaggcacgtttacatcagttgggcgctcaggtgatgatgagtcagactgtgggagatgatctggaggttatgactggggctttaaaagaagcagccaaccaggcagaactggtgatcactaccggtggtgtttccgtgggacagaaagatctgacagaagaggcattgctttccataggagcaaagatcctctttcatggtattgccatgaaaccgggaatgcctacgcttgcagctgaaaaagatggtgttttgtttatagggctttctggcaatccattttctgcagcaattccatttgaaatgtttgtacgtgagatcttgtcattaaaaatgggtgatccagagctgaagctgcgtcgggaaactcttactgctgtaaccggtttctcaaagaacagcaggagacgtcgttttttaagaggaaaagcggtcggaaaagaggtctggcttccagaccagcaggcaaatgggcagatgcgcagcatggtaggttgtaactgcctgatcgagataccggcaggcagtgggccggtacaggctggggataaggtagaagtgctgtggctgtaaagaatgcggacattttaaatgtaggggcattttttgctgtgatgaatacttgaaagaataggggacgctactagacatatccactttctttggctataataaaggtaacttcataaagcagatttcatatgtatatcccggagataggtccggagtttctaccaactgccgtaaatagttgactacatagtacatgtagctgtgagtacctggctatgtgttgctgtgtgcgggtttggtgacagatgaaagtgaattttaaaggagtcccgcgcaggcggggctcttttttcattgccatgcatctggaaaggagggcaaatacgcacaccaaacgcagacgggctgttttgtgggtttatgatctgatgtttacaaatcctgattgagatcaaggaggaaacatatggaaaataaaacatttgctttaaagggaaatattgtatacacaaaagataaaaatgaattatgcatcaatgagcagagttatcttgtctgtgaaaatggaaaggtccggggaatttataaagagcttccggacgagttgaaaaatgtccctgtagaagatatgggcgatcagctgatccttccgggacttacagatcttcatgttcatgcgcctcagtattcctttaggggtcttggaatggatatggagcttcttgactggctggaaaccaatacatttccagaggaagcgaaatacaaagatctggaatatgcgaaaaaagcatacggcatctttgcagagcagatgagaaaaagcgccgctacaagggcatgtatctttgcaacaatccataaagaagcgaccattttgcttatggatctgatggaagaaagcggtctttccactatgatcggaaaggtaaatatggaccgcaacagcccggattatctgcgggagccgtcagcgaaagactcagaagaagcgaccagagagtggcttaaaatggtggctgacaaaaattacgaccatacaagaccgatccttacgccacggtttacaccaagctgtaccaatgaactgatggagcggttaaaaggaattcagaaggattttgacctgcctatgcagtcccacctgtctgaaaatccaggagagatcgcctgggtgaaggaattatgcccctggtccaaattttacggggatgcttatgatcatttcggactgtttggaggagagtgtcctacgatcatggcccactgcgtttattccggtgaggaagagattgcccgcatgaaagaaagaggcgtatttatcgcccactgtcctgactccaataccaatctttcttccggtgtagcaccggtgcgccggtatctggaggagggaatgaacataggactgggaagtgatgtggcaggcggaacaagtgagaacctgtttgcagctatggcacagtccatccaggcatccaagcttcgctggagattgttagatgcttccttaaagccactgactattgaagaagcattttatatggcaaccaagggcggcggagctttctttggaaaggtgggaagctttgagcctggctatgaatttgatgcagtggtctgcgatgacagccgtctggaacatccccagccgcttactgtaaagcagaggctggagcgtatcatttatctgggggatgagagagaagttgccggaaaatatgtagaaggcagaaagctgttttaatcatgcgaaagtaagttgggttcagctatttgcatcgtataaaaagcagtcggatacaggaaaatacagcctgttccggctgcttttcttgtaaaccacccggcttcatgttattatgtatacaacgatctgttgcagagcaacatgatcctgtatccgtgtaacaggcttgcagatataaaaggagtagatcgatgatgtatttgatccatttgggatatcttggatatgatcaggatgcgcagacagcatttatcccaaatgaagaaatacgccaggagctgacagcagcaacaaggcgcaatcccaagaacatcagtgtatcattgagaaattataataaaaatattgcagataaaactgttctgagcagcagaaaggacgaaaatacaatgaaatacgattttacaacaattttagaccgaaagggaaaagactcgattgcagtggaaccttttgaggctgactggatcaaatggccggggaagacgaaggaaggttttgatattatcccaatgtgggtggcagatatgaactttccggctgtacatacgatcccggaagcgattattgagagaacaaaacatactacctatggttacttttctccaagagaagaatattttgacgctatcatcaagtggcataagaccagaaatggcatagagggactggaaccaaagcacattggatatgaaaatggtgttttaggcggtgtggtcagtgcattaaatgtactttgctcgaaaggtgacagtgtactgcttcattctcccacttatatcggttttacaaagagcctgaccaacaacggttatcacattgtccacagcccgttagtgaaggatgagaataatgtataccgcatggattttgaggatatggaaaagaaaatcgtggagaaccatatccatgcagctattttctgcagcccgcacaacccaaccggccgtgtatgggagcgctgggagatcgagaaggccatggagatctacaagaaacatgatgtatatgtagtttctgatgagatctggtctgaccttctcttaaatggacataaacacattacaacccagtctgtatcggaagatgcaaagcagaggaccgtagcactttatgctccgtctaaaacctttaacctggctggtctgattggcagttatcatattatctacaatgactggttaagggaccgcattttaaaagagtcctctttaagccattataacagcatgaacctgttatctatgtatgcattgatcggtgcttataaaccggaaggttatgagtgggtggatgaattaaaagaggtcttaagtggaaatgtaaactatgcctgcgattacattgaaaagcattttgaaggagtcaatgtttccaagccggaaggcacctacatgcttttcctggactgcacagaatggtgcaaaaaacatggaaagactattacagagcttcaggcagcaggcattgaagtaggcgtgatctggcaggacggagtagctttccacggcccatgtcatatccgtatgaacctggctctgccgctgtccagggtaaaagaggcctttgaccgcctggacaaatatgtatttaatccgcaggaggcataagcaacatgatatttgatacacatgcccattatgacgatgaagcctttgacgaggacagggagcagcttttagccagttttaaagaaaatggcattgacgctgttacaaatgtagctgccagtctttccagctgcaagactacactggagcttgccagaaaccatgatttcatgtatgctgcattaggtgtacatccaagtgaaagcgcagaactgtctgatgaaggcttaaaagatattgagacctggtgcacagaaagacaggacggaaaagtccgggctattggcgagatcggccttgattattactgggaagagccggataaagagatccagaaaaaatggtttgtggcccagttagatctggcccgcaggttaaagcttccggtgatcatccacagccgtgatgctgcaaaagataccctggatattatgaaggcagaacacggatcggacatcggtggtgtgatccattgcttttcttatacaaaggaaatggcaagggagtacctggatatgggatttttccttggcattggcggcgtacttacttttaaaaatgccagaaaactggtagaaaccgtagaatatgcccccttagaccgcctggtactggaaaccgactgcccatatctggcaccggttcccaatcgtggaaagagaaattcttccctgaacctgacctatgtggcagaccagctggcagccatcaaaggtgtggaccgggaaaccgtggagaaaatgacctgggataatgccagaaggctttaccgtttatagatgcagatccgcccgtcactggcgggtggaagcgaaatgatataaaaataatagaaacagaaagaagacaaaagcaggtaaaatcgtaaatgaatgagaaattatcagatccgaaaaaaacaattgaagtcatccagaaatatcagtttgcgttccagaagcgcttcggccagaatttcctgatcgatgctcatgttctggaaaaaattgtaagcgcagcaggcattacaaaggatgactgcgttctggaaatcggtccgggaattggtaccatgacccagtatctggcagaaagtgccggacaggtgatcgcagtggagatcgacactaatctgctgcctatccttgcagatacattaaaagactattccaatgtaaaagttatcaaccaggatatcctgaaagtggatatcaatgaactggtaaaggaatacaacaacggcagaccgattaaagtagttgccaatctgccatattacattactacccctattatcatgggactgtttgaaagcaatgtgccaatcgacaatatcacggttatggtccagaaagaagtggcagaccgtatgcaggtgggaccgggatctaaggattacggcgccctgtctctggcagtgcagtactacgcaagcccatatattgtggcaaatgtgccgccaaactgctttatcccaagaccaaatgtaggttccgcggtaatccgtctgacccgctatcaggagccgccggtacaggtaaaagatccgaagctgatgttcaagctgatccgcgcatcctttaaccagagaagaaaaacactgcagaatggtttaaataactctccggagatctcattctccaaagaagagatcacaaaggccattgagagcctgggcgtatcaccttctgtccgtggagaagctttaagcctggagcagtttgcccagttagctaattacttcgtgcagtaagtgggctgtttataaaaagaaaggcaaatgcctatgtcagataaaaaaagatggatccggctggctgtggctgcaggtttaggcgcggcagccggtgcatggacttatcagatacaaaaagataaaaaagcgaaaaatgatgccagactggcggttgtggaagcagctgtagtgcgcagccgagattatggaaagcagaaggcttatattataggaaatagtttaagctctctggcggcagcagtctggcttataaaagactgccattttcctggaagcagtattatggtgtatggggaaaatgaggaggcatgtggaaatgcaggtcctcttgtagtaagccgggaaaactgcgaagattttctggaactgtgtggaaaactgccaggttccggggaaaaagtgtttacgtttccaaaaacagaaggtggagaacgtctgggatgtgcagaccttccggcactctggcgactgttatgtacagaagaggaaagactggatgttttaagtgttgaagactggttcagtgggacacctcatatatttgagacagatctgtggcagctgtgccagtgtgtgtttggactgaaaaaagacagcagtctggcggaatttcgcagaagtttatgggaattaaaagggccgtttctgtttctttcaccggaagaaagacaggagctgatccgtttgctgaaacagtatctgcgccgcaaaggcgtattgttgctggaaaacactcaggtaacggatctggagcttgaaaatggaaatggcaacggaagcggaaccggtctggcagtgaaaaaactgtatgtaaaacgcagactgcaggaagaagagactgaccgggaagcttttgtatttgaaaagatagatctgagatccggggatgtctgcattatggataatggcagcggttctggaaaattatggaaaaaggcagctgacctgcatattgctctgggagaaccggaagcctttgtgggcgaagaagataaacttcagccccttcggcctcatcattttacagaccggcctaaaacagttccaactggaagcagaaaccttggctttgtgggagcattttcacggctggaagaaggctgctgccttacaggaaactatgctgtggcaagtgccagaagtgcagtggatgagctgatgcatgcaggaagacgggcagcaggaacagaagaaaagaggcagtcccggatcagaaaatggatcacagtttacaaggtggtttgttcattgtaccgtgctgacttataatttttgtgtatggtcatgccgccatcaggcggtctgttagtttctataaagtatttgtttttaaaaggaggacagcaatatgctgtttatcggaggtatcagtcagggccggaagctgcttaactacgcaagaagcattctttgcggaagctgtggcagcaccagccagtgtcaggtctttatgacctatatgtatttcagttttttctttatcccgctgtttaagtggaataagcgcttttatgtgcagatgtcctgttgcagcgccatttacgagctggagccggagatcggaaaagctatattaagaggcgaagaaccggcaatcacatccgccgaccttcacctggtccaggaaggaaaatacacccgcacctggcaggaaggttccggaagtccccacaagaagtgtatgcgctgcggatttgagacagacgaagattataactactgtccgaagtgcgggggacggatataaggaacgcataaggaaaacaagcgccgctttaagcggcatttgttttccttgcgtccttaacgaacaaaccgtctgcgatagcagacagtagagcgcgccagcgcgtgtttgtgagtgaacccaacgcctgcaaaataaatattaaatctccccaaatgcgatcaatggatctttgcattttacccccagactcagggtgtaataaagtacaacgccatcaaatggagctgtacatcggaaaatttcatttccataaatatctttcagggtgccaagaagggtgcccttttttaatttctgacctgcatgtgagacagcaggataccagaacccattttttggtgcctcttcataaactgcctgacggatctcttcctggtgaaggtcagtatctgagaaaggtctgatcttaagatgagccattaactcaaaaatattccttttgcatgctgtgacctcatcttcgcaccatagccctctttctccccgttctgctaaaagtgccgggataccgcactgagcagcccagctatagagtccgttttttgcagtagaagcgacccgatatggaatcgagagtgaggctgcagctgcagaagcttttgcggccagtgcgtcagaaacagctgtgggaaagaagaccaggggagtaagagcttcgttcacatcaccaccatggagatctatgagaaaatcagcttcaggatacagtgtttcttcaaggagctttgcaagacggctggaaaaagtaccctcaggatctccgggaaacgtacggtttaaattttgaccatctgcagggattatctgtttggaccccatgtaaaagccttctggatttaccaggggaagcaggatgatacgccctgaaagatcaatggggtccagttcctttttcagacggttcagggtttctatgcctacatattcacagccgtggacacctgcggtcactacaagggtttttccgggacagcttccgcagataacagtcatttctatgggatagtggctggcaactggcagtaaaagggtttgctttgtattgctgccggcttttaagtcagacagtctcatatttttcagatctcctttagttgaattcgataatagaagccaaaagctttctggcatagtcatcttttgtttctgcaatacgggatacaggaatgtgttcagtaatgcggccatgatacagaaaaagcacatcatcgcacagataagtgacagaagtcaggtcatgggtaatgaaaatataagtcagccccagtttttctttcagatcatggagcagatccatgatctgaatctgagtatgggcatccagagaagagatagcttcgtcaaaaagaatgatctctggctggcaggctacagcccgggcaatgcatacacgctgcaactgtccgccggacagctcatggggataccggtttgcataggaggaattcagcccaacaagctctaacaggcggttgatctcttccaaacggttcaggcggatcttttgatttcgttctcttgcagccagtccttctgcaatgatctcttttacacggaaacggggattggcagaagtggtgtaatcctggaaaacaacacttaagcgtttttgaaggtttttccggccatttctggaggcataaacagatacatcctggatctttacttctccggtgtcaggctttaaaagaccacagatcacacggccaagggtagatttcccacttccggattctcccagtattcccagacaggttccctgtgagacttttaaggacacatcaaacaacacctggtttctggcagttccgaaaatcttttcctggcgttcacttcggaagctgacgcatacattatttacttcaagcatgggatatctcctttccatgtaagatgtcacggtagtggcacataacagcagaacgcttttctatcagcaggcgggtgtagggatcgtttgcatgatttcggatatgctcaaagtctccgctgtctacgatctgtccgctgttcataacaaggatgcggtctgctactttggagatggctcccaggtcatgggtgatgaaaagcatggcagtatttttattctttttaatgcggacaaactcttccaggatctcgtattgagtgacggcatcaatggcagttgttggttcatcagcaatgagaagttccggctgcaatgccatggcaataccgatcataatacgctggagcataccgccggagagctgatgaggatatttttccagaacttcttctccatttaagatctgcatctggtccaggatcttaaggcaacaggtacgtatttcctgtgcattccatgcagtatgtgcggcgaaggtttcagccatctgatttccaatgcggtataaaggatcaaaacaggtcatagggttttgaagtaccatggtgatccggcttccacggagcctgcgaagttcttcttttgactcttttaaaagatcatggccatcaaaaacagcgcttccggaaacctggaaatttttatctaacagacccaggatggattttacagtcatgctttttccgcttccggactccccaaggatccccaggcattctcctgggtggacttcaaagctcacatcttctaccagctttttggaggctttacgatatgtcagagttacattcaggttttcaacttttaaaacggcagacattacagcacctcctttgggtctaacacatcacggatggcatcacccattaagttaaaggcagaaaccagaataacgatggcaataccgggaaccagcatctgggacggattactggtcaggacattttttgcttcgcttaacatagcaccccattcaggagtaggagcctgtacaccaagtcccaggaaggacaaagtggaaatattgataatggcccagcctacatccagagaagacaggacagccagatcagctgcaatagatggaaccaggtgtctgaagaggataaaacgttccggagttcctacacagcgggaaaactggacaaagttccggtcacggtactgcataacgcccgttcggatcatacgggcataccaggcccatttgataaatacatttgccaggatcacgttctgtacgttaatgcccagcagcgcaactacagcaaaaaccatgatctgactggggaaagacagcattacatccactatacgcatgatcagttcttccgtaatgccacgaaaatacccggctaaaaggcccatcagggcgccgagaccgatggtgcctaacatggtcagcacagccaggccaagagtgggacggatcccgtagatcatgcgggagagaatacagcgcccaagattatctgtgccaaggggatattctttgctgaaatgggcaaatttgttaagaatattggtggcatagggatcatgtggagcaataaatggggcaaaaaggcccatgaatgccacgatcagtacaatggttactgtaccaacggcagttttattatgaagaaaccggtgtaacattagttgctctcctttcgcatacgggggtcagacacggtttgcaggatatcaaacagcaggttaaacataacaaacaggacaccgatgagcagaacgtaagtctggatcacgggataatcccggttgaaaatggaactgatgcacaaagttcccagtcccggccatgcaaatacattttccactacaatggttcctgagatcagctgtgggatactcatgccaatggcaacaatacaggtatgcatggagtttttcaggatatgttttaccagaatggatctctgcgggagaccgcgtacattggcataaagtacataatcctgtttcatattttcaagcatattgttgcggatcaggcggatataggtggaaatatagcttaaggatacagtaaaagccggcaggatcagatgcctgatggtaccgtttccgctggtaggcaaaaggtccagtttaatggagatcagccacatcaacagaagtccgacccagtaagggggcatggcagtggtcataaatacaaggctccgcatgatccggtcaaaccagccatctttatatacagcacaaagaaagccgatagggagacttaaaaggatcaccataataagggaagcacctgcaagctgtaaagtagcaggcatacagcgcagcagttctccggcaacagtacggcttgggtttacataactgatgccaaaatcaccgtgaagacagtccaatacccaggtaaagtaacggaccagataaggcttgtccagcccaagctgggaacggacctcagcaatggcatcttccgtgatgataggtacctggcgtacacgtaaagctacttcagccggatcagaagggatcaggttgataaaaacgaagcatacaaaggaaatgatgagaaggagcggtatggcagaaaggatccgcttgataatatagggtttcaaaataatacctcccgttgaaaaaataaatgtaataaaaggatccgactggaacaaagccgcctcagaggagacggctttatacacaagattaggtttgttttgccagatttagaaagagaaatcctggaatggaacctcgtactgagtctgggtaaagtggaagcctttcatatcagagcggtagattgccttattgcactcataggtcagtggaatataaacggcatcttcgtggagatgggtcagaacataggtataaagttcctggcgtctgttttcatctgtggtgatcaggatctcggtaatggcatcatcgatttctgctttatcatccagaccaagctgcgctgcatagtcaccatatacaggagcgcgcatggcagcaagagaggactgtggatcgtatggtgtaccccagcagatattgaataccatatcaaaattacctgctttcatattatcacggtaggactgctcctcttccccgtggatgtttaaagaaacaccgatggactggtattcgctctgaagatactctgcaatggatttttcagtcacgctgtcactattatagagaagatcaatatttaacggctgtccatccttttcacggacattgccggaacccattttccagcctgcttcatccaaaatctgtcctgccagttccaggtcgtaaacatatggttctagttcaatatcacaatatggaacagtggatgcaaacagagtgtctgccggtttttccagtccgtaaaaaataccgtcagagatattctgcttattagttgcatgctggagcgcaatacgtacatccttctctgaaagaatgtcagaggaagtattcagaacaatctgtctggtagaggttggatcagaaagttccacggtaaactgatcgctgtccagatactgattaatggcatctgcgtcgatcatattttttccgaagatcatatcaatctcacctttttccagagccaggatacgggtctgattatccgggatgactttcacggtgatggttttgatggcaggctgttcgccccagtagttcggatttgccttgaatacagcatactcatcggtaacaaattcatccagcacatagggaccggtaccaatataagcttctaccccatctttggtgctgccgtttttcatggctttcggggagatcatggcaaatggtcttgttacaccaagctctgttaaaaggggataatatggttcggataattcaatcacaaaagtgttttcatcgggagcatctacacctaccaacagatgcatcatttccagccaggtatggcggtctttattttccaggattgcgtcaaagtttgctttgatggcatatgcgtcacacttttcgccatcagaaaatgttacgcctggacgaatgtggaatgtatatactttaccgtcatcactgacatcccagctttctgccagacagccttcaaaaccgtcagaggtaatattgaccaggccctcatataacatttcctgggcgtacatttcgccggcatataaatgtgggtttaaatcgcggatatcgcggtagtttacgaagatcaggtcttcctttgtaccttcagctgtggtggtagtttctgaaggattggactctgcagcagaagatgcagagtcagaagcggatgaaccgcagccgcttaataaggcggtgcctaagagacctgccagaagcattgtgccccatctttttttcatgataagtttcctcctgttgtaaaaagaacataatgttgtttattcattcgcctgaggcgaacggtagaaagtataacatgggttaggcaaaacttactactaatgaaattggaggggcttagttattccaaaatgttataaccgggcgaaaaaacttataaaatttccttaaaatgacagataaaccattcagcagctttacttaattttgcatgatccgggcagatgtagccgatgaggagaaaaggctcacaattattgatcctaagctggcgaacatcatattggcggtactggtcatagagaaaattaatgccgaggctgcatatatctgtgttcagtaacagattgacagtcagatgatcactgttggtatagactgcatagtggagctgctctgtgctgatcgccccaaggctcacatggttcaaatggtgctctacagagaaaaaatcccttacaccccgtacaaaggaaagagaagaaaggtcctgaaagtcaatactttcatcatgatagcggggatgctttggaccaacgtaaacacaggcttctttgctgtcaagaggaacgaatttcagctttttgtgggacaggatatgctggaactggtggagctgtttctgtgcaatataaacgatgccaatttcagaaagtccctgggctacccggttgctgatctcttccaccgtgccttctaaatgttctacaatgtaggaatttcccatttctttataaaaatcagtcaacagacgggagatcatattgctgggataagtggccagactgaatttttttccctggttgtgatcggtcagtgagttgatcaggcttatattgtgcaggatattctgggcatattcacggaccgtttcaccatagggggtaatgtggatcccccggctgctgcgctcaaaaagaggccgtcccagttctttttccagggaactgatcactttactcacattgggctgtgtggtataaaggcactctgcagcctggttaaagctgcctttttcacatgtgatcataaaatattccagctgacgtaattccataagatcctcctgaagtacaataaacagtaagttaatgctaactactataacagaaaaaaagacagtatacaacaaggctgataaagcaacagccgaaagaagcacttattgagaaaaaatgccggttattccaaaggggaatatcaatgtatccggcgccataaagtggtgtgttttgataaacaacttgacaatttttaccaataaatgttattctgaatacgaacagggagcttgtgaagcaggctgagaggaagtaatcgaacttcgacctattgtacctgatgtgggtaatgccaacgtagggaaataatgtgtcgcatattatatttgcgtatcgtgcgtatattttgcggtccgttccttatgtgggcggaccgttttttttgtttctgcgcaaatccagatgatccacatatgcgctagagatctgtgcagcaaatgtggaaaacgttccgtccaggtaccccttctgtggaaaaatattattatgtgaaggagaaagaaaatggactacacaacacagatggatgctgccagaaaaggaattattacaaaggagcttcaggcagtagcagaaaaagagcagatggatacagcccggttaatgcagctggtggcagagggaaaagtagcaattcctgcaaacaaaaaccacaaatgcctggatccaaacggtatcggctccatgttaaagaccaagatcaatgtaaacctgggaacttccagagactgcaaagacctggatatggagcttcagaaagtaaatgacgcagtaaaaatgggcgcagagtccattatggacttaagctcctggggagatacccagaaattcagaagaaaactgactgctgaatgcccggctatcattggtactgtaccgatctatgacgcagtggtatactatcataaggcactgaaagatatcaccaccgaagagtggttaaagatcgtggaaatgcatgcacaggacggtgtggattttatgaccatccacattggtatcaaccgtgcaactgcccagcgtttcaagaaaaataaacgccttatgaacattgtatccagaggcggttccattatctttgcatggatggagatgaccggaaaggaaaatccatactatgagcattttgatgagatcctggatatctgccagaaatacgatgtgaccatcagtttaggtgacgcctgccgtccgggatgcttagaagatgccaccgatgtttcccagatcgaagagctggtaacattaggagagctgacaagaagagcctgggagaaaaatgtacaggtgatcgtagaaggaccgggccatatgcctcttaaccagatcgcagccaatatgcagatccagcagagcatctgcaaaggcgctcctttctatgtattaggacctttggttacagacattgcacctggatatgaccatattacagcagctattggaggtgccatcgcagcaacctacggcgcagcctttttatgctatgtaacaccggctgaacatttacgcctgccggatctgaatgacgtaaaagaaggcatcatcgcttccaagatcgcagcccatgcagcagatattgcaaaaggtgttaagggcgcttccgagtgggaccgccagatgggaatggcaagaaagaaactggactgggaaaagacctttgagctttccattgatccggaaaaggcgagaaactacagagcatctgcgaagccggaaaaagaagatacctgctctatgtgcggtaacttctgtgctgtaaaaaatatgaaccgcattttagacggcgagatcgtaagtatttttgatgaatgaaatgagcccaaaagaaaaacaagcggctgcgaagcagacatttgtttttcttgggccattaacgaacaaacagtctgcgatagcagacagtagagcgcgttagcgcgggtttgtgagtggatgatggatatgagaaaaggagagaaccatgaaatttgacaaaagccagttgttgatctatgcagtaaccgaccgggcctggaccgggaaaatgagtctttatgagcagacagaagcagccttaaaaggcggcgccaccatggtgcagcttcgtgaaaaaggactgcgggatgacaacgtggaagaatatctggaagaggcgaagaaaatgcgcgctctcacagaaaaatacaatgttcctctcctgatcgatgacaatataaaactggcaaaagcctgtggtgcagacggtgtccatgtaggccagaatgacatggatgccggtcttgcaagacaacttcttggaccggataagatcctgggagtcacagccaaaacggtagaacaggcattaaaagcccagtcacagggggctgactatttgggcagcggtgccgtatttggcacatcaaccaaaaaagatgcccgccctatgacgatggaacagctgcaggcaatctgcgcatctgtaaagatcccggtagtagccattggcggtatctgcctggataatattgaaaaactgcagggaagcggtgcagcaggagctgccattgtatccggtatttttgcagcagaagatattgaagggactacccgagcccttcgtcaaaaaatggaacgtattatttagacgatgccaagtggttacaactgggatgtccgtcataaaaagacatgatatttcaaaaaatgagaaaaattcttgataacaaaggggactgccataggcggtcccttttctatttgtcctgtttttaacaaattcagaaaaatcctttatttaagccaattctgcgttattctcaccaaactataacaataaactgataacaactttttttaatggaaatttttccaataacctgcacgatttcttgttgaaaaattttatcaaaataaaactgcccctcataattgacgaaaaaatttcagttagtgtatactaatgcggcatgcgagttagtatgcattaactcacatgttcagtaatctacaaaagaggagttttgtacttatgagaaaaacaggaagaacaaaagcactgttagccatgtttcttgcagctgcatccttgcaggcaggaactgcttttggtgcacaggcagcaaccgggtcacagctgcaggcgggaacctgggtaaaagaagatgcaggctggaaatatagaaagccttcaggagaaatggcaaccggatgggtccatactgcaagcggctggtattatctgcagcctgagacaggtattatggcaaccggcatgctccgtattaatgaccgtacttattattttaatcagacaccagatgctgtagaaggcaaaatggttaccggatggtaccaggatgcagctggcaaatggtatttcttcagcactactgcagacagcactgaaggtgcagcagtaaccggatggcagtgggtcgatggccgcagctattattttgagccggcagcaggagagaacactggaaaaatgtttgcaaatgatgtaacaccagatggctacaaagtcaatgcagacggacagtgggtagatgaaaatggaaacattcaggtagtgcctggaaaaggattttcaagtaatcctggaaaagataccaattctaagaccactgtaagaggcggaggtggcggtggaagcagccacagcagctccggcagtacagataacggaaataataatgccaataacggcaatacaaataatggaaacaccaacaacggaaacaccaacaacggaaacactaacaatggaaataccaacgacagtaattccagcaacgacaatacaaacaatggcaacaattccaacaatggaaataaccagccagaccagaataaagcagtttttgtaaagcaggatcagacaaaactgacagagttaaattcccttggctggtggatcacggtagcatttgaagatggctataatgcaggcaatacaaaggtctatgcagatggcgtagatgtaactgcagctctttcaaatgtaactgatgatggaagtatctgcaaactggctgttacaaaggcaccggctgttcttactgtaagcagcaatgatgacggggcacaggtacagaccgtttccttagatgatactgcagcagatggtattatctacacaggagacagctatcttcctgaaaagatcatgacacacggaccggtatccatctgggattactatctgaccaactatgcagatgatggttctgtaagatattcaccatctaagacaacattcgctcttggagaaaagccggtggctcatcctgcttattcaccggatgcagaattaggcgaagatggaaaagcaactgtaaccattatgttcaattacaataccgacgatgagaaagagtggtttgacggaattaaccgccttcagctggtagagtacaatgaaaataagaacaccatcaacagtgatcttgtatttgaccgtgcaaaagatgtagctcatggaagtggccgcgtaggcgaactgaccattaagagcggacagggcaatttcacaaacaacggaagatattatgtccgcgtagagtccaaggcaggtacatctgctcttgttccgatccatgtagtaaatgcccaggcacctgttctgaaattacaggaaacagcccagtctggcgtaaacctgcatttccaggttgaaaacatggtatacggaattgagacaccgatcagccgtgtggttctggaaggaccaactgagacggtagaattaaacgagatcgatgactggttcctgttcagccaggatctgtttgtcctttataatgataatgtagatcatttaaaatataagggcaattacaagctgactgtatatgcagacggatttaaggcaacctctgtcagatttaaagtaacaaatggtgaaaatgttccatccaaggatgaaatgggaatttcccagtattcatttgatggcgtctccacagcatccacaggttcaggcggaggcagcagctccggcgaaagcagttccggaagcagcgctatttctgcaaatctggtatttgataccgacctgctggtaaatgcagaacttctggaagaagctggaagatctacagctgagtctgaggcagttgtagactggtggtacaacattatcaaggatgcagtatttgacagagcagaaggaaaatactatgactggaccgattatgtatccagcgtagaaaataagaaatacgaagacgatcagatcctttcctttgaggattacaagagaaccggtgtgacctggagcaacagtccggcaactgcaaaggaagttctggaagatggtcttttaggtgagatccagaataacggtgattttgcccgcccggcagctggtgcattcacagtagagcagaacaaggaaggcgaaaatgttgttctgaagcatgaaaatgcacagtatctggctgctatcaaaaatgttgtgatcaatgacagctggaccggacttgcaaaagacaagtatacagtagatgttgaaaagggaactttaactctggatcagagcctgttcacaccgggagaagaatacaagatcgcagtagaagcagacggataccagatgaatgcatttaagatcacttatgatcagcttctggaagagggactgactctgactgtgaagtatccagatggcaagaatgagtatgcatctgataagagaacctttggcaagatccagggatactatgcagacgcagaagtagatgtaaccggttctgaaggcggtttcttaaagtatctgacctctgtagttttagatgaggatgataccctttatacaaagggctatgaaggaagcgatgcagcatattatgagatatctgctgacaagaagagcctgaccatcggaaacatcaaacctggaacacatacactgactcttcgcgcaaagggatatgtagatgcgttaacagcacagatcgtagttgcagaaggtgttgacgagcctgaggttacgtttgttccggttgtaaagagcctggagtacaaggaagctggcttctttatgtctcctgccaactattacattactttcgagaatggtacagatactgatgctaagaaggtgctggcagattatcttgacgcagtaaaatctgttacggttggtgatgtgacttatacaaaggcattacttggacttggatataataataatgagttcgcagcttctgttgtagacagtggttacggtagcattaatgactgcctgcgtatgactgttgatactggatttacaggtgatacagttgaaattgttgttgaggcagaaggatatgataccattactcttactgctgtaaagaacagcaatggtaaatatgctctgaaatctggttccgaaattgttcctcctgcagaagataaggatgctccaaagcttactggacagcttaatatccagcgaggaaatgaatggacactgaaaggcaatgcagaatatctgaaagcaattacttctgttaagtatggagaagaagaacttgacacaacagtaaatgacacagagattaccattgatacatctgaattaccggttggtacacataaactcacaattgaagcagatggatacaagagccaggtaattgaagtaattattgagtctgatggtaatgccggagaagatgagggcgttgagggacttacctttgagaaagctcatgtgaaatattggtttgatgattatgatacatatcgcttaacatttactgatgagaaaattaacgatgtcagcagagatctttacttaaaagctatcgattatattgaggttggagatgtaaaatattcttatggtactccagatattagcaaaaactcaaataaatttaagcagggtggcactaatacaggaaccggagagcaggaatatatcgattttacaactgatattgctgattttggtacagacggtactccggttaaagtcactatttactctactgctaaagcagactatgatccatatgtattctatctgaaagcaggcaaattagttgcagcacctggtgaagataattctggagataatggaaacgatgaaagtgataaggatatcacttttgaagaagtttcagtagatagtttcctggcgaagtatgaagcatatcgtttactccttaaagtagacaccataaacgatatttcaagagatacctatcttggtgctatagattatataatggtaggacagcatcagtatgaaagctgtagttatggttctatatcagatcagcagtttaaagtaggtacaacacctgaaagtgatggtatgggaaaaggaaaagattacattgattttgctaaggatggtttcgatgcttacgaaacaggtgatctgatcaaagttactatttacagtaagaagagcgaatatggttcttatgtattctatgtaagagatggcgaactggtagacccaaccgaagcagaggaagaacttttagatgagcaggaaatgaaagaagaggctcaggaagaagtaactgttcctgaaacaaaggatgaaacagttgttccggaagttccggctgaggaagagccggctgataaggatgcagaagaagttccggcagaagatgaagtaaccgaaccttctgaggaagataaggaagatactgcagaagagccggcagaggataagccagaggaagatgcatctgaggataaggactccgaagactccaatgaagatgtttccgaagacactgcagctgacgatgttgccgaagatacagaagcaaccgaaacagaaggagaaatctaattgaaaaaatggtgtctggtgatcctgacactgatgttatgcggatgcagtgcatctacaaaaacagcagaaacagaggcggtcaaaaatgaccgccctgttttgcgtacagagacaggatccgaagaaaagaactttaccgtatttgccatggacacagtgatgcagttccagatctatggcggaaatgatgacgtagaagaaaaagtccgggggaaaatagaagaactggaagatacactttctgtgacaaaagaaggaagtcccatgtgggaattaaaccagaagaaagaggcaaagtttgcagaagaagttgcaaagcagatgcagcagacacttgaactttgcaaagatacagacggtgccttagacatttccgcctatcccattgtaaaagcctggggctttaccacaggtgaacatcgcatccccgatgaggaagaacgcaaagcattagtctcccgcgtagattaccgcaaaatccaggtaaatggtaatactgtatccatagaaccggatatgatggtagatttgggaagtgtaggaaaaggctatacagcagaggtcctggcaaacctgatgaaagaagaaggtgttacttctgctcttttcagtctgggaggaaatatccagacagtaggtacaaagtcggacgggtctgactggttcatcggtatccgggcagcagaagaggaccgttatctgggaggtgtttctgtaacagataaggcggtggttacttccggtggctacgagcgttatttcacaggtgatgacggtcaggtctactggcacattatggatcctaaaaccggtgctccggctaaaaatgggctggtatctgtgaccattatcagtgacagcggtttcctctgtgatggtctttccactgccctttttgtcatgggtccggaaaaagcggctgaacactggcgcagccaccagaattacgaggcagtcttagaagatgataaaggccagatctatattacagaaggcctggaaaacaccttcaaaccggtagatcttggcacagagcaggagatccaggtgatccgcagataaagacggcttgtaaagacaaatgcagcatggtatcatgagtgaagatatgaataaaaacacagattttcaggaaaaaggcggacatattttatgaacatccagatcttcggcacaaaaaagtgcaatgatacaaagaaagcagaacgctttttcaaagagcgtggcatcaaataccagttcattgacatgaaggaaaaaggcatgtcaaaaggcgagtttaactccgttgcccaggcaaacggaggcctggaaaatatgatcaactgggatgggaaagacaaagatattttgtccctgatcaaatatatcgcagaggaagataagctgcaaaaagtcctggaaaatccccaggtgatcaaaacaccggtgatcagaaacggaaagcagtctaccttaggctatcagccggatgtgtggaaaaaatgggaatagatagataatagataaaaatagcagaaaaatgcgtataataaaaaagcaggtcgcagatatcacattttatggaaatatccgcgacctgttttatatttgctgtgagaaccaataataggaatagagcttatgcgttcttctgtgcgcagaactgatccattacttccaccaggtttctgtggtcttccagatgaggcaggccggagatcatggcaacaccgcggaactcatcatttacaataattggaaatccaccgccgcagaatgcatagtgggactcatcctgctgccagttttcttttacaccgtttaattcccgttcaacagcagcccgcagggaagaagtatggcagcgctcaaccgtgtgctgtttgcggttcatccactggttattgctttcgtctgttcccggaaggaaagactgatacaggataatatcatcaaaaacaatacggatggcgattggctttggagtggtcagaccacgctcgcgaagcatggttcccagtgtgtaagcatcattgtaatcaaaagaagaaaagtggatacgctcttcctggcttttgatctcttctaacatttttaaatcgtacataagaataccctctctatactcatatttttccagaattattatagcctttaaatagaaatgtgtatagtaaaaaaataaagtccccaaaactgtttctaaaactaacctttagttaatattttccctgaaggaacagctgtatagttcagatatacagaacaataggatcagtttcataatttgtaagaaagagggaaaatggatgtttggattggaaatagccacattgctattgggaattagttttattgcagcaggcatgatccagagcagaaagacggggcagaaaaaatggcgtattttaatgatcattgggatcatcccggttctggtcagtgtatttttattggtctgcacattctggctcttatatgggatccaggtccaggagccagttgcaggtccaacagaaaacggaaagatcattacggaaaacacagatgcagagccagaaccaggttccggttcagattccaacatccctggcagcgactggcgcacttacagggcttattccgaagacctgcacctggacgataaaggcgctctcattttctgcctttccccgttagataataagaacggctatgctgtatatgacagcgcaaatggggccagagtaggaactcttttatggggatcagaaaaagaagcggactggcaggctaaagcacagatggaagacttagatcatgacgggataaaagaaatcggcatatccatggcagatggagaaatcctgtggtaccattaccgggaaggtttggaggatacctggccggagaataaatgtggttgttttgaaaaagttgattaaaaaattaacaaaagaaaagcctgtaattatgggaaaaactgtaaaaacttaagattataaacattgacatttccatacagagtgataaaatattaacagagttaaacagaacatatatctggaaaggggattttggttatggcaatgaatattgattttactggaaagacagtccttgttacaggtggtggacgtggactgggtaaagagatggcacttcagtttgcaggatgtggcgcaaacgtatatattgcaaaccgtaaagaagatcagggccttgctactgtaaaagagatcgaggcacttggcgtaaagggcggctttacaaaatgtgatgtagctgtggaagaagacgttaagaagctgatcgctgacgcagcagcatttggcggcggaaagatcgatgtgatcgtaaatgcagcaggcgtaatttcccttcaggatatgatgcatacaactacagaagaggttcagagactgttcaatatcaatgtagtgggaaccgtacatatgatcaaacatggtctggcacatctggaagcaaataagggcggaaacatgatccttgtatcctctattgcaggcagagacggtatgggaatgctccagacttacagcgcatccaaggcagctgtaacaagcctgatgcagtccgcagcaaaacatgcagctccttacggagtccgtgtaaatgctattctcccgggaattatccgtacagcaatgtgggaagagatcctggaaggcatgaacaatggctgggatccagaagttcataatgaactgactcctgagaaacgtgaagaactgtggaatgcttccgttaagagcatgatcccgctgggacatgatcagaaggaagaagatattgcctgggcaactgtattccttgcaagtgactttgcccgcgagatcacaagccaggcactgtgcattgatggtggtactacctccggaagataatcatatgacatgaattgaaaaatttaaattaaagaaataaagagataaaaagagcagccgcttttggaaaatgaattccattagcggctattgtttccggttttgcctactgtaactttatagtcccggcgcagaagttccagataaaagatacttttgaaagcatttctggatcggttcatctggcgcaatggggcgatacagttccaggaactctgcaaaggagaatggataaataataaactccacataacgtccgccaagataagtggaaagctcactggaaagaagctttgcgtttgaaccggtgatatagatgtcgcagtcaagggatacacgcagggagttgatacacttctcccagtcttttacttccgggatttcatcaaagaacagataggctttaccgttgatttctgtggctcgttttgtgatttcattatgcagtgcctttgcagtttgcagatatgcgtagtttaaatcctcaaaattaatagagatgaactgagcgggactgacaccggactccatacccgctttcaaaaattgaagttttttcatttctcgaaaccgcttcgctgtacgtattatactgtctgctaatagtatatgcaagatgtcgctttcaaaaacgcaaatttttttattttttgaaagtggaaactatgtaaaggcaacccgaaggctgccccaggcatcaagcctattctgcttacacaggttcacggcagtctgccgccgtacacatcataatcacttatgaaccattcttcataaggattaccaaagtcatcttttgaaccgattccaattcgttcaaatactttttgcagatcttctgacgtggtaggaaactttacccattcgcctaccagctccccttcgttatattttccgagattcgtgatgtaagcttcaaatgggcaatcgtggtcatattcatatgccatgctatttcctcctgtttcatttttcaggtcgtcacccggttttcggcatcaaaaaaagcgccatacccatcaccattccggcaatgagcagacgctttatattttgtccgtattcttttgcaaaagagaaacaaatgaaatgtaagtttgtagctcatgtctcatttgtctatgataatattagcacaggtcaattctgaaaaaaagaggcagaatggtagtaaaaggatagcaattggtaacaaaatgggagcaatacggaaacatgctgcacattcccctatcctctgtccacagactctacacatataataattccataaaaaaatccttcctcttcttcttgattatttattctgctttagaaaactgatcttttccaacaaagcataatggacattcaaaatctgccggaacatcttcccattttgttcctggtgcaataccaccttctggatatcctttctcttcatcatattcccatccgcaaacatcacatacatatttcatgaccagttcctccatagaatttattctttataaaagtatataacaataatacatgatagtcaagataataatagtaattattatcatttttgcaatgaacatttctacgttatgttcttctatcacgattttactttatggcttttcgttcaaaaacatactctgtctccgatgacagatctcctctgaaagtatatccaagtctatcaaacttttttatatctacaggattttcaatattattctctgccataaatctaaccatttcaccgcgggccattttggcatatgtaccttttgtaaccaatttatctccggataactcacaaaatacaatcgtaatatatctgtcctgtggtgtcagatacttttctatgcactttgagtattctttagatgccagatttatgatcgttctgctatcatcaatcactgaatgatatagcaggtcaccccagtaatcatatagatttgttgtttcttcaatctcagcttttgcctgcatttcaagacgataaggagtcacaccatccattggttttaaaatgccataaaacgcagacaggattcttaaatgattttgcaaatactcaaactgctggatttcaaacac

SEQ ID NO: 3533 - DNA, 283025 bp, Unknown
  gut microbiota DNA sequence
ggcacatttccatctgtgatgagagttgtaaaatcctcgatgccgcacacctggtatcgtgaaacagtgttcagtttgatgggatttaccagtgcgatgacgcggctggaggagcggatcagctgtcgtttgatgctgacctcttctggatagggaatggtcatgccgtattcaggatgaatagcatagactcccatgaagcacagatccgggtgataggcagcagcctgggcagcggctacttcccctactgtggtcatggagttttttaacagatcaccgcccaggataataacacggatctgttcttttaaggagcatacatgggcaatgctgtagctgttggtaagaactgtaagctttaaattatcagggatatttttggcaaactggagattggtgctgctgccgtcaatggcaaccagctggtccggctccagaaattccagtgcccgcatggcaagctgctgttttaaggcaacatccgcggtttcccggtcaaagaagttgatgaccggtttttccagagggatggcaccgccaaatacccgttttaactgtcctttctggtccaggtctaacaggtcacggcgtatggtatcttcggaaacctttaattccccggccaggtggctgactactacctttccggaggtatgaagtttatttaagatccaggtctgtctttcttcttttaacatgataatgtcctttcataatcatattcacaatgacaaccataacctgttttaaaatcccaacaggcatacgataaccggcaggaatacagccggaagcatatttgcgatcttgatctttgttccaatggtcagatttaaaccaagggcaaagataaggatagaaccaatacaggaaaggcgtccgatcatcaggtctgtaagatagggttttaccagacctgcaagaagagtgatacttccctggtagatgcctacgggaaacatggaaaatgcagcgccgatacctaaggatgctacaaaaacaatggaaagcacgccgtccataacagcttttgtaaagagcatggtataatcatggtttaaaccgtcttcaatggaaccgacgatggccatggcaccgatgcagaaaacaagggaggtgcttacaaaggcttctgtaaaattggaggaagaggaaccatttggaagcttggatttgacccagtcccccaggttttccattctctgttccagatccagacattcaccgatggcagcgccgattgccatgcagatgactaccactaacgtatctttggtctcaaaagtagttcctgatacgttcatcagccctttgatagcgcctgtaacaccaacaaagaccacacagagccccactgcgctggaaatcgtggtctgcagccgtttgggaatgccattttttaataaaagtccaataccgcttccgataaggatagcagccatatttacaagtgtacctaagccagtcatatgtaaaacctcacgatatattgatatgttctgaaaataacaaggacatattaccatatttcaggaaagattggaataaagatttgaggggcgtgtactgcccggggtttacagtgtccgccagagcaagtataatagaagtaatattccgatgcatcttgtgcggcatagccgtgcaagatgagtcgcttaagtaaattttaaagaaacgaggatataaatatgaaaaagctggaagaatatgtaagaagcatcccggattttccggaacctggtattattttcagggacgtaactaccatccttcaggatgcagacggtctgcacctggcagtggacagcatccgcaatatgttaaaggatgtagattatgatgtagtagtaggtcctgagtccagaggatttatctttggtgtgccggttgcctatgcagagcacaagggctttgttccggtccgcaaaaaaggaaaactgccttgcgagactgtttctgcaaagtatgcactggaatatggcactgcagagattgagatgcacaaggactccattactcctggacagaaggttgttatcattgatgacctgatcgctaccggtggtactacggaagcaattatcaagctgatcgaagaactgggcggcaaggtagtgaagatctgttttgtaatggaactggcaggacttaagggaagagaacttttaaagggctatgatgttgagtctgctattatctatgagggtaagtaatcagaactcataagaaagtaataggtataccagaccttgcttttttatttaaaaaaaattataatggtaactaattatttgtaaaaaggtggccacatatatgggaaaagagggaacaaaagaaaaactggatatagagcttgaagctccggcggactttaccagcccggaagtgttgtatcaggatctggtcaaaacgatccataaataccatccttccgatgatatttccatgatcgaaaaggcatacaaggtcgctgcagaagcacataaggatcagaagagaaagtctggagagccttatatcatccatcctttatgtgtggctattatcctggctgatctggagatggacaaggagaccattgcagccggccttcttcatgacgtagtagaagataccgtcatgacactggatgagctgaccaaagagtttggtccggaggttgctttcttggtagacggtgttaccaagctgactcagttaaactgggataaagataaagtggagatccaggctgagaacctgcgcaagatgttccttgcaatggcaaaggatatccgcgttatcatcgttaagctggcagaccgtcttcacaacatgcgtaccggccagtactggaagccggagaagcagaaggaaaaagcaagggagaccatggagatctatgctcctattgcagaccgtctgggtatttccaagatcaagatcgaattagatgacttatcacttaagtttttaaagccggaagtttattatgacctggtagaaaaagtggatctgcgcaaagatgcaagagaagcttttgtccagtccattgtagatgaagtaaaggcacatttagacgaagcaggcattgaagccaccgtaggcggcagagtaaagcatttcttcagtatttataagaagatgttaaagcagaacaagaccctggatcagatctacgatctgtttgctgtgcgtatcatggtagacacagtaaaagactgttatgcagctcttggtgtgatccatgaaatgtacaagccaattcctggtcgttttaaagactatatcgctatgccgaagcagaacatgtaccagtctctgcatacaactctgatcggcagcaccggacagccatttgagatccagatccgtacttacgagatgcaccgtactgctgagtatggtatcgctgctcactggaaatacaaagagagcggaagcggacagatcgctgccggaaaagaagaagagaaattaagctggctgcgccagatcctggagtggcagcgtgatacagatgattccaaagagtttttaagcatggtaaagggtgatctggacctgttctctgacagtgtttactgtttcactccgtccggtgatgtaaagactcttccaagcggctctactcctattgattttgcttattccatccacagtgcggtaggaaataagatggtaggcgccagagtcaatggaaaactggttcctattgaatatcagatccagaatggtgaccgtattgagatcatcacctcccagaattccaagggaccaagccgcgactggctgaagctggtacgcagcacacaggcaaaaaataagatcaatcagtggttcaagacccagatgaaagaggataatatcatccgcggccgtgatgccattgaccgttattgtaaggcaaaaggcattaacctggcggacctttccaaaccggaatttatggaaaaggtaatgaaccgctatgcctttaaagactgggattctgttcttgcatctattggacatggtggcttaaaagagggccaggtcatcaacaagatgttggaagagcgggagaagaagctgaaacgtgagatcactgacgcagaagttctggacggcattgccgatacagatggaagaagcggcgaagcaactgtacgcaagaataagagcggtatcgtggtcaagggacttcatgatctggcagttcgtttctccagatgttgtaatcctgtacctggtgatgagatcgttggttttgttaccagaggaagaggcgtttccatccaccgtacagactgtatcaatgtgatcaaccttccggaagatgaaagaggacggctgatcgatgctgagtggcaggtggcagaaaatcctaccagtacagagcagtattccactgagatccagatcttcgcaaacaaccgtatcggcctttttgcagatatttcaaaggtatttacagaaaagcagatcgatattacttccatgaacgtgcgtaccagcaagcagggccgcgccaccatcattatgacctttgatatccatggaacagaagaactgaaccgtattaccgataagatccgccagatcgacggtgttctggatatccagagaactacaggctgatgaaactgctgcatccggccggatctgcagtggcagacagtgccatatagaaggagaactatgagtaatttcaggataaagaccatggtgcttggaatggtgagcacaaactgctatctggtctacaacgacgataccaaagaaggcgtagtggtagacccggcagataatggagcctatattttaaataaatgcagtgaactgggtgtaacaccggtggcagtgcttttaacacatggacattttgatcatattatcggagtgcctgaggtaaagcgggcattccacattcctgtatatgcctctgaaacagaagatgccatgctggcagatacttctattaatctgtcctgccatgtgcctggaaaacagaccagtttccatgcagatgtactggtccatgacggggatgaattagaacttttaggatataaatggaaagtcattgcaacacctggacatacagcaggttccgtcagctactatattccggaagaagaggtacttctttccggtgatacgctgttttatgagtcctatggccgtacagacctggcaacaggaagcagcagtgatatagcggattcccttttaaataaattatttgtgcttccggaagatactatggtctatccgggacatggggatccaactaccattggctatgaaaaggagcacaatcctattccgtattacagataagtacgaaagaggtacgatagatagaaagcaggaagaaaatgatcggattattaatacaggataatgcatatgaacaggacatcagagaacttctgatgtctttttatccgggtgagacttatgcccatgaagtaaaagagggcgttgatttttatgtacagaccagattagaggacggggaagctgttattgggatctgggaaaaactagaaaatggggaagaactggaaggctggactctgactgcccattccacaggaaaagcagatctctcagaccactctgccacaaaaaacgttattaaaaaattattctaccagatgcttgtaaagcgtactggccatgaacttccatggggttctcttacaggaatccgtcctaccaagatcgcattaagccgtctggaagatggatggaaggaagaagacatccgcaaattcatgaaagaaacttacatgaccagcgatgagaagatcaatctgagcattgagatcgcagcaagggaaaaacgtctgttagagccgttggactatgacagaggttacagcttatatgtaggtatcccattctgcccgactacctgcctgtactgctccttcacttcttatcctatcagtaagtggaaaggccgtaccggattgtatctggaagccttatttaaggaactggaatatacagcggaaaagatgaagggaagacctcttgataccatttattttggaggcggtacaccgacttccctgcctgcagaggacattgacgctatcttatgtaaattagagcagctgtttgatacaaagaatgcgctggaattcaccgtagaagcaggacgtccggacagcattacagaagaaaagttaaaggttttagcttcccatggcatcagccgtatttctattaacccacagaccatgaaccagaagaccctggatctcatcggccgccgtcatacagtagaaaatgtaaaagaaaagttccacattgcaagagaacttggctttgacaacatcaacatggacctgatcatgggacttccaggggaagatctggatgatgtaaaacatacattagaagagatcgaagccttaaaaccagactctctgaccgttcattctcttgctattaaacgtgctgcaagactgaacatgtttaaggaagaatatgcggacttaaagatcaacaacacaccggaaatgattgctttaagtgaagcctgtgcccgcagaatgggtatggaaccatattatctctaccgccagaaaaacatggcaggcaactttgaaaatgtaggttattctcttccgggaaaggcatgtatctacaatatcctgatcatggaggagatgcagaccattgctgcctgcggtgcaggaactactacaaaagtagtattcccatctgaaaacagaagggaacgctgcgagaatgtaaaggaagtagagcagtatatcagccggatcgatgaaatgatcgggcgcaaggagaagattattcactaaaggacttgcaaaatcgggaaagttcattacaataaaaaaggaatagtacagatagagaacagatagaaaacagggagaaaaatatggcattaacaaagaagccggttaccggcatgaaagatatcactcctgcagagatgcagatccgcgaatatgttatgaaccagatccgcgagacctacaagggttttggtttttcacagatcgaaactccttgcgtggagcatattgagaacctgaccagcaagcagggcggtgataatgaaaagctgatctttaagatcttaaagagaggcgataagctgaatttagagacagcaaaggaagaaaatgacctggcagacagcggtcttcgttatgacctgacactgcctctgtcccgttattatgcaaataatgcggcaaaccttccaagtccttttaaggcattacagatgggaagcgtatggagagcagaccgtccccagaagggccgtttccgtcagtttacccagtgcgatattgatattttaggcgatcctaccaatctggctgagatcgagctgatcctggcaactactactgcattaagcaagatctgcccggacaatgcatttactgtaagaattaacgatagaggcatcctttttggcatggcacgttactgcggttttgcagaagaagctatggacagcgttctgatcactctggacaagatggacaagatcggttttgagggtgttgagaaagaacttctggaaaatggaaacgctcctgaaagcgtaagccgttatatggagatccttcgcactgttaccaatgatgcagaaggtgttaagaagttaggagagactttaaaggatgtaatggatccatctgtatgccagggactggtacacattatggagactgtaaaagacgtagcagaggctgaatttggccttgtatttgacccgactctggtacgtggaatgtcctactatacaggaactattttcgaggtttccatggaaggcttcggcggttctgtagcaggcggcggaagatatgacaagatgatcggcaagtttaccggtatggagacacctgcatgcggcttctccattggttttgagcgtatcgttaccattctcttagacaatggatttacggttcctggtgctggtgagaagaaagcattcctctttgaaaagggaattgactccgcttctttagcagctgtgatccgtgaagcaatggaagagagaaagaaaggcgttcgcgtactggtagcccagatgaacaagaacaagaagttccagaaggaacagcttggaaaagaaggctatcaggagtttaaggaattctataaagaaagcctgaaacattaatcgtacttatatacagtagggtaatttattagttaatagctataaaggagaaaaatcatggcagaatcaatggtaggactgaagcggtcccacagatgtacagaagtaacttctgcccagatcggcgagaaagtaaccgttatgggctgggttcagaagagcagaaacaaaggcggaattattttcgttgatttaagagaccgttctggtatccttcagatcattttcgaggaaaacgactgcggaaccgaaaactttgagaaagctgagaaattaagaagtgagttcgttattgcagtagaaggccgtgtagaggcacgttccggcgctgtaaatgaaaacctggctacaggtgccatcgaagtaagagcagagtccttacgtatcctggctgagtctgagactcctcctttcccaattgaagaaaagagcaagacaaaagaagatctgcgtctggaataccgtttcctggatcttcgccgtcctgacatccagagaaacctgatgctgcgcagccgcgttgctactctgacccgtgcattcctggcagaagaaggatttttagagatcgaaactccaactctgatcaagagtacaccagaaggcgcaagagattacctggtaccaagccgtgtacatccaggttctttctacgcactgccacagtctccacagctgtttaagcagttactgatggtttccggttatgaccgttacttccagttagcacgctgctaccgtgatgaggaccttcgtgcagaccgtcagcctgagtttacccagatcgatatggagctttctttcgtagacgtagatgacgttttagacgtaaatgagcgtctgttaaagaagctgttcaaagaagtctgcaactatgatctgcagctgccgatccagcgtatgacctggagagaagctatggaccgttttggttctgataagccagaccttcgtttcggaatggaattaaagaacgtttctgaagttgttaaggactgcgagttcgttgtatttaagagcgctttagagaatggtggttctgtccgcggtatcaacgcagagggacagggacatatgccaagaaagaagatcgatgccttagtagagtacgcaaagggcttcggcgcaaagggccttgcttatattgctattaatgaagatggcacctacaagtcttccttcgctaaattcatgaaggatgaggaaatggctgctttagttgctgctatggatggtaagccaggtgacttattactctttgcagctgacagggacaaggtagtatttgatgtacttggcaacctgcgtctggaactggcaagacagttagacctgttaaagaaagatgactttaagttcctctgggtaacagagttcccgttattagagtactccgaagaagaaggacgtttcgtagcaatgcatcatccatttaccatgcctatggatgaagaccttcagtacattgactccgatccgggaagagtacgtgcaaaggcttacgatatcgtattaaacggcgtagaaatgggcggtggttctgtccgtatccaccaggcagatatccagtctaagatgtttgaagtacttggctttacaccagaaagagcaaatgaccagtttggcttcctgttaaaggcatttaagtacggagtaccacctcacgcaggtctggcatatggtttcgaccgtatgatcatgttaatggtaggcgcagacagcatccgtgacgtaattgccttcccgaaggtaaaagatgcctcctgtcttatgacaaaggcaccaactcctgtagatccaaagcagttagaggatctgggaattgaagtaattccggaagaaaaagaagagtaaaaagtttgtgtccataaaactcatggattataattaaagaaaaatgctgtacccggaacaatgattttcgtgttggaaaaagaagttttgggatgctataatccgtttcagaaaaagaatccagaaaacatgaaacggcaaagaagcctctgaagagttagatcttcgggggctttttctgttctgtggggtccatatattatggaaaacaaatcaggatcagatcaaagggaggcagcagatcatgagcgatcagaaacagacaaaagaaaatgaaacaatgaatgcagcacaggtgttagtaagatgcctggaaaatgaaggagtagaatatgttttcggtattccgggagaagaaaatctggaggtaatgcgggcgttaaaggactctaagatcaaatttatcacagtccgccatgagcagggcgcagcttttatggcagatgtttacggtaaattaaaaggcaaagctggtgtgtgcctggcgaccttaggccctggtgctaccaacctggtaacaggtgtggcagatgccaatacagacggcgcaccgctgatcgccattaccggtcaggtaggaacggagcgtatgcaccttacatcccaccagtatctggatcttgtaaccatgtttacaccgatcacaaagcgcagcaaacaggtggtaaatccggataccgtaaacgaggtagtccgcattgcctttaaatacgcagaaagtgagaaaccaggcgcctgccacattgacctgccctgtaatattgcagctatgcctgtagaaagtgaagtgggacgccagcctttaaagcatcacaagccaaatctggaaatggcaagtgtagaaagtctggaagaggcagcaggactgcttttccaggcaaaacgtccagtgatccttgcaggacattctgctatccggaataaagcatctaaggctttgacggaatttgcggagaaactgcatattccggtgatcaatactatgatggcaaagggcattatcccctgcgataacctatattctttatggactatcggtattccacagaaagactaccagaatattgctattgaagaggcagatctggtgatcgcagtaggctatgatattgtagaatatgcacctaataaatggaacagcaagggaaatcacaccattctccatattgacgcaagaccatgccacattaacaagctgtatcagccggatgtagaggtcatcggagatctgtcctattctttaaatcatattgccatgcgttgtcatagaaatgataaacctgagtgggcatttaagcttcgtgatgaaatgcgtaaggagcatgaggcttatgccaaagatatggaatttcctatgaagccccagaaaatcttaaatgatgtgcgcaaggtaatgggaaaagaagatatcgttatttctgatgtaggtgcccataaaatgtggatcgcaaggcattataactgttatgagccaaatacctgtattatttccaatggctttgccaccatgggaattgctgttccgggtgcattggcagccaagctgatcaacccggataaaaaggtactggcgattactggtgatggcggttttatgatgaactgccaggaatttgagactgccctgcgcaccggaactccttttgtaaccctggtctttaatgattgcagctatggcctgatcaaatggaaagaggaagaccggtatggggaaaacttctatgtagactttacaaatccggattttgtaaagtttgcagaaagtatgcatgctattggataccggattaacagcgcccaggaactgatcccgactctggaaaaagcatttgaacagaaagtaccggttatcatcgactgcccggtagattaccgggaaaatacaaagcttacggagcatttaaaggaattaataaaatcatatcaggcgcagcagcctgaggcatgattccagaagatataaagaatcatggtcatttaaactcaggcctgttagttcttcaattttctttaaacggtatataagggactgccggtggagatttaactcccgggcagtctcgtttttgttgtaattacaacggatgtattgggataaagtcagcagcagttcctagacagaaatacttttgatcattatgctgtttaaagcaataaatcttgccattctttcggataattaagtataatatatgaaacgatgtactagtacatgacagaagataaaaaagtctcagcacacaggaggcatgatcatgaatctgaaggaacaggaatacgtctgtgcactggcagaaaacggaacgattacagcagcggcaaaggagctttttatttcccagccagcattaagcatatacattaacaatctggaaaaatccctgggagtccggttatttgagcgggtgggaaagcagtttatccttacttatgcaggagagcagtatgtggaaaaggcgaagcttattttacagctgagccatgaactggatgaaaaattaaaggatattactggaaattacagcggacgcatccgcatcggggtccagctgcgccgggcaaccggatttttgccccctgttattgcctcttacgaaaaggagtttccgggagtggaagtgatcctttgtgagggaaccatgaaagaattaaaagaaagtatacagaattttaaagcagatctgcttttatgcaacagtgtagacctgcctccctatatgaatagttttgtggtatttaaagaacatcttcttattgctgtcccaaaagatcatcccatcaatgaaaaggcagtctgggaagaaggaaaagcccttccaagtctggagcttttctggctgaacggggaaaagcttatactggcaaaacagaaccagagtatccgcagggattcagaacgtatattaaataaaaatggagtaaggccgggaaaaatacgggagatacgcagcatagaaactgccatgcagatggtaggagaaggactggggatcggatttaaccgggaaagctatgtgatgtatatgaaaaagcaggaaaatgtgcggtattattgtatgcgtaatattgacagcaccactgattttgtgctggcataccggaaagaaatgccggtgaccggctatatgcagcgtatgatcgatatgcttatggaacacggaagagaatgcgagaaaatttttccacaggtgatccggcagcatggatgtcaaaatgccttttgatgccaatattattatttattaaatttatataaagaataaataaaattaaatgtacttccacgctttagcgtgataaaataataaaaaagtacggaaggagtattaaaaatggcagaaaaaaacaaaaagacatttaaaatgcctcacacatttgtgatcatgatggtcatcatcctgttcgcaaccttactgacctggatcattccggcaggacagtatgtgcgtgtggaaaacgcagacggagtaaaggtagtagacccgaaccagttctcctttattgaccgctgtccagttaacccacttctgatccctctttacattgtaaattccatgtgtaagagagtggatttgatgttagtcatcatcttctcaggcggtgcgtttgacctgatcagcaaatccggcgctcttcattctgcagtagcccgtgttgcaaaggtattccagaaccgtctgtatatctttatcccgatcatgactaccatctttgcgttgatctgtaccactcagggtgtaaaccagttcatcgcatttgctcctgtagttgtaatgatcactctggcaatgggacttgactccatcgttggtgcggcgatcatcctgttaggcggcgcagttggttttgcaactggtactgtaaatccaagtaccactgttgttgcccagaagatcgcagaactgccgctgttttcaggaatccagtaccgtgcagtctgcttcgtggtattccttattattacaaacatttatctggtaagatatgctttaaagatccgcaagaatccagagttaagcccaatgtatgacctggacagccagaatgagcagaaagacctggatattgattctttcggaaccatggatgtaagaaaaaccctgatcatcattgctctggttgcagctttagccggtatggtagttggttctgttaagtttggctgggatatgccggagctagcagctgtattcgtaggacttggtattgtagttggatttattgcaggagaaactccttctaatatgtctaaggtatttgttgaaggctgtaagaagatgctgactgctgctatgatcatcggccttgcaagtgcaattgcaagtatcatgagtgcaggaaagatcgtagatactgttgtatatggtttagcttcctgcttacagcatacaccgggcttcttaatggctcctgcaatgtatattgcaaatacactgatcaactgtgtgatcgtatctggcagtggacaggcggcagcgatcatgccgatcatgatcccattatctgacctgttaggcgttacccgtcagaccagtgttctggcatataatttcggtgatggtttctgtaactatattctgcctcattctactgctcttatgggtatcatcagtgctgttaacatcccatatgaccgttggatgaagttcatgtggaaattgttcctgatctgggcagttacagcatgtattatgacagcaattgcccagggtatccatttaggaccgatgtaatgtccggagggaaattttatgacaacgaaaaatgaattatttgaaaaaattgaagcacagaaagaaaaactgtgggaaatggctgattttatctttgaccatccggaatacagaggcaaagaatatcaggcatgtgatcttttaacaaaatatcttacagataatgggttttctgtagaaaaaagcgtaggtggatatgagacttccttccgtgcagagtggaaacatggggaaggcggtcctgtgatcggtatcctttgtgagtatgacgctttagagggcttaggacatggatgcggccatcatatgcagggaccgtcctgtttaggcgcagcagttgctttaaaggaatgtgcaggagaagagccatttacactggtagtttatggcacaccggcagaggaaacccttggttctaagtgtgatatgatcaagaatggctgtttccacgagctggatgcagcgtttatgatgcatggaagcccgactacctgtacagatgtaaagtgcctggcagaccagtcctttagggttactttccatggaaaacgtgcccatgcagcactggctccggaacagggacgcagcgcttttgatgctcttttagtagcatttaatggtattgaatttttaagagagcatgtgccggatgatgtgcgtatgcattataccgtagcagagcttccgggaccggctaatgtagtgcctgtaaagtccgtaggtaagttttccctgcgttctttctccaaggaagagttaaagggtgttgtaagccgttttaaggacattatcaagggtgcagcactgatcgcaggtgttgattatgaattagagcagaccagcgatttctacaataagatcccggttcttaagttaaatgagcttcttatggaaaatgccaaactggcaggtgctccaagactggcaccaccaagagaaaagactggttccactgattttggaaacgttatgtatgagattccaggttcctgtatccgtgtagctttcgtaccggaaggtacatcttcccactctcaggaatttgtagatgcaggaaagacacaggctgcaagagactgcatcctctatggcgccaagtccattgccggagcttctatggatctgatcacaaagccggagctgatggatgaagtaaaggctgagtttgcagaaaacaagaaaaagttcaaataaaaagaataagtaagaacatcatattgatcccggtaagacggactgtgaataaaagcagaatgtcttaccgggatttttagaattttataaatttcagaaaacatattgacatttatatgggttgtattataatgcagatataaacatatgaacaattattcatatgaaatatttatgtgaatacaaaggaaaggagcaccgcctatggcattaaacgatgtggaacactgcgaagcatgtcagatccacgaagacgtggtaaaagcagtgacagaccatatgccggatgaagaccagctgtatgatctggcagaggtttttaaggtatttggagattctaccaggataaagatcctttatgtgctgtttgaggcagaactgtgtgtctgtgatattgcccagttgcttaatatgacccagtctgctatttcccatcagctgagaatcttaaagcagaaccgtcttgtaaagaaccgcagggacggaaaatccgttttttattcccttgcagatagtcatgtgaagacgatcatcagtcagggaatggaacatatccaggagtaatgaagggatatagtaaatgaaagagctgttttattaaaaaatattttatatcaggaggaataaaactatgaagaagaaatttaaactgatggatctggactgcgctaactgtgctgcaaagatggaggacgctattaaaaaaattgacggcgtaaatgatgcaacagtcagctttatgatgcagaaactgactttggatgcagatgatgaccgttttgatgagatcctgaaagaagcagcagagatctgtaagaaagtagaaccggattgcaagatcgttatgtgatctgcggtataaggagatagccatgacaaagaaacagaaaaacatgctcacacgtattctggtgactgcagtgctgtatgcagcactggtggcagcagatcatatgaagatgatccctgctgtgtttgaaggctggaagctgctgtttttgtatctcatcccttattttgtgatcggctgggatatcctttataaggcagtgcggaatattaaaaacggccaggtttttgatgagaattttctcatggcagtagcgaccattggtgcctttggagtaaatgaatattctgaggcagtggctgttatgctgttttatcaggtgggcgagctgttccagggttatgcagtaaaccgttcccgccagtctattacggatctgatggatatctgcccggaatatgccaatattgaggaagatgggcagttaaagcaggtggatccggacgacgtggaggttggcgatatcatcgtgatcaagccaggtgagaagatcccgttggacggcaaggtcgtttttggcgagtctatggtggatacttctgcactgactggtgagtctgttccgagaagagtgaaggaaggggacgatctggtaagcggctgtgtcaatggaaatgggcttttgagggcggaagttaccaaagagtttgatgactccacggtagcaaagatcctggaactggtggaaaatgccagcagtaaaaaggctcatgtggagaattttattacccggtttgcaaggtattatactccggctgttgtgatcggtgcagttgttctggctgtacttccgcctctgtttttaggccagtcatgggctgaatgggtacgcagggcatgtactttcctggttatctcctgcccttgtgcgctggttatttcggttcctatgagtttcttctctggtatcggtgcggcttctaagaagggcgttctggtgaagggaagtaactacctggagacgatggcaaagctgcatacggtggtatttgataagactggtacgctgactaagggcgagtttaaggtagctgagatccacagtgttgacggagatgagaaaaagcagagtatggttttggaactggctgcgctggctgaaagttattcggatcatccaatctcacggtctatcagggatgcctggggtaagaaactggatcagagcagagtgagtgatgctgaggaaatttctggtcatggcgtgaaggttaagattgacgggaagacagtgcttgccggtaatggaaagctgatggataaggaaggaatttcttatacagagtgtgcttctgttggtacggttgtgtatgtggcagaggaaggaaagttccttggatctattgtaattgcagatggtattaaggatggcgtaaaggacgcgatccgaagcctgaagcgtgccggtgtttctaagaccgtgatgctgaccggcgataagcggaatgtggctgaggctgtggcaaaggagattggactggatgaggttcatgcggaactgcttcccggtgacaaggtggatcgggtggaggcgctattgaaggcacttccggaaggcagaaagctggcttttgttggtgatggtattaatgatgcgccggtgctttccagagcggatgtgggaattgctatgggaagtatgggatcggatgcggcaattgaggctgcggatgtggtgctcatggatgatgatccgagaaagattgcggatattgtaaggatctccagaaagaccatgggaatcgttatgcagaatattgtgtttgcactgggcgttaagtttgtagtattggctatgggcgcttttggtgtggcgaatatgtgggaagcggtttttgcggatgttggagtttcggttattgcgatcctgaatgctatgagggcgttgcgggcctaaagagtcgtgacaggctggaaactggcagctgtgaggttgtgaatcgtgcaagaaacggccttacatttcacttatcattgtccagtggctttcgatttgcacctgttcgcctgcatcggactttgtccgctgcattcggacagctgcactcaagatgtggacaattgataagtgaaatgacggcctgtgtggtccatgataaaattttaaattgcgcgaagtgcgtaataaagctcctgtagggaatagttagtgttctttacaggagcttttatagtgtgccgaccggtgtcgtgcttccaccccgcttatggcggggtgaaaacactggttttaatggtttggccaggtgttctgtcatcctggtctctttggcttccagtcgccgttttccgcactggtaggcatacagcagggaaatttctaaattctgcaacattttaaaagacctggctgtatatagagtagaaaggtaataaaacctaatattttgataccagggtcaaaaggtcataaatccgatgcaagcttgcttgcataaggatttttgaacttgggacccgccaaaaacatgagtaagaagccattttttgaagaaaaatgagcggattacgaatgtttttagaattgcgagagtgcaaagcgcgtagcaattcggtatcagaggggtcaaaataccttttgaccccaacatcatattttatagatatgaaaggacttataaaaatgagaaaattaatgttagttttaatgtgtgcaacaacaatgacttctatggcagcatgtggagccaaagaacccgtaacgccagaggtaacaaaagcagtaacagaaaccaaaacagcagaagaacaagaaacggttagtgaaactgtgggtatgccaaatccatggacagactgtaaaaatctgaacgaggcagaagataatgttggattttcaatcacagttccagaaaagatcgatggttatacacggaccatgattcagacattagacaaagaagtcatccaggtattttacgaaaaagacgatcagtcagatagcactattcttattagaaaaggaattggttctgatgacatcagcggtgattacaacacatacaacgagaaaacacagttggatataaataaaaaccagataatggaacagggcaatgacggaaaagttatgctggcaacatggacagatgcaggctatacttactctgtaagcactctgggactgagtgagagtgaaatggaaaatatcatccagcagatagagtgatgaggataaaggaaccaaacgatgaatagcatcagcaacatcagtattttaccggaaataaacagcacgtccatatggcatacattggtagataatgtgcttaatggtattgcatatctgtttgcagccatattgtcaaccagagcaagaaagatagaaacggcgcctgtgggtgttttgcaaaatacatcagctatagaaacagtattggatatctatggtaatgcaatcctgcggcttgcatactcctatctccataacatgagtgatgccgaggacatcctgcaggataccctgatcaaatatatgcaatcatctcctgcgttccttaccgaaagccataaaaaagcatggcttcttcatgtagcagctaatttaagcaaaaacaaaatagattataacaagatccgggaaacagacgaactggaagaaacattggtggcagaagaaagagaagatctgtcctttgtatgggaagcagtaaaagcattgccagaaaaatacagagaagtgcttcacctctactatcaggaaggttatcccaccaaagagatcagtaagatcctgaaccgcaacgaaagcagcatccggtccgatctgaaacgaggcagagaagccttaaaacaagtattaaaggcggcgtatgattttgagtaaatcttatcatgagatcatggaaaaaatagaagttaccgatgaaatgcgtactcatatactgaataatgtatccagacaagtatccaatacttcgcacaaggtggtcacattcccacacttgcggaaaatggcatccattgctgcctgcaccgcacttttgctcataggcggaaccatgatgaaaaatgccttttacccatcatccaccgatcccaatccagaactggcaggaagcgtatacggtatggaagaatgtaagtcccttgcagaactgaccaaaaaagccggtttcaatgtaaaagacatctctgaagcagatatgccatttaaagttatgtctacttcttacctctggtgctggaacgaatttgcccagatcatatatgaggggaccgataattccctgacttacagaaaaacaagtggaacagacgacatctccggtgattacaaccagtatgaacagatattagataaagttgtaaacggtgttgatattacaataaaaggcaatcatgataaatattatcttgcaacctggacaacacaagacttttcatactccctttctgttgatgaaggcattgatctggaaacaatattaaacatcatccaaaactctatggaataaaaagcttctttaatttttactccttgtatacacaggccgtatttcacttatcgattgtccacatcttgagcgcagctgtccgaatgcagcggacgtagtccgatgcaggcgaacaggtgcatgtcgaaagccagtggacaatgataagtgaaatgttaggccgttttcttcacaacttaaaacctcacactgccaatttctcagcattcacattctcacagctgcttctcaatccagcgtatcgctagccccatccaactatcacaataaggctccagatatttctgatcgattccctgggtttcttctgtcccaagcgcgatcccatgaggccccaccggatacaaatgcgcctccacatttactccggcctttcttaaagcctgtaaaagcaacaggctgttctctaccggcactgactggtccgtccaggtatgccataaaaaagtttttggaacctgaggacccacctgatactctaaggacagaagcctgcgaagtttttcatccttcttagaagcctcagctcccataagacattcaaatgaccctttatgacaatattctccagaagtaataaccggataacaaaggatcatcccatccggccgtatcatttccggctttacccctaaagccccatacaaccattccctatcccagaacacgtccagacagcatgccagatgcccgcctgcagaaaagcccgaaacagcgatcctgtccacatccacattccactcatccccatgctcccgtatcaccttcatagcaagagccagctccatcaaagcccgaggaaacacatccggcgccagactgtaatgaagcacaaaaacatgaaaaccagcagccagatacttcatagcgatgggctggtcttctctggtagaaagtgtacggtatccgccgcctgggcaaagcagcacagccggcctctttttatccagaataccatccaccggttccaaaatataagcagtaagatccgccggaccaccgaaaacaggctttttagtctgtttagaagtaacttcaatagaaatatgcttaaccatcatatcagaaatctccttcccaaaatgcaaaaagacggccacgccctgtgaccgcctaaattttcaaacatcctaaaccagaatatcttccaacgcccgtttcggcacataatgcacctgattctcatcccggtaataagttgtactgccatcctcgccaaccggcaccatacgaacttcttccttcggcttaccaagagccagcaccagcgcaagactataacgctgtggatcaagctcaacagcttctaagatctcaacacgtttgcagcttccgatcatacagccgccatatcccttctcaacagcagaaagcatgatcgtctgggaaacaatgccctcatcccacatcagattttttccaatagaaagatcctcaagtaccagcacataagcacttggacgttctccatctgcaggtccgtcccagtcctttaaggcaccggcccataacaaagacgggaatacttttgcacactcttcaggtgtagagatcagcttaaacttaagcccctggcagttctttgtacaaccggtcagacgggctgtatccaccatatccttcaggtcttcataaggaatagaaacctcctgaaaaaaacggcggtaagaacgacatttcttcacaagatcctttaacataacaatccctctttcatagctcaaaaatttattgtttggcatatcaaagaggcgccggtggcgcctttgctgattactcttcttccttcatatcagcaggaagctcatttccctgagtaatatgtttcttaatagcctggaaactctgggagctgagaacatgctcgatcttgcaggcatcttccacagcggttttttcgtccacgcccaggtagatcagccagttagacagcataatatgacgctcatacatcttatcagcaatatcctgaccagtctgggtcagagtgatgtggccctggtcatccatgtggatatagccattttcacgcaggttcttcatggcaacgctgacacttggtttggaaaagcttaattcatttgcaatatcaatggaacgcacataaggtttatgcttgctgagcatatgtatggtctccagataattttcagcagattcctgtattttcacaacaacacgccctttcattagaactcaaagtagccgtagagcgcatccgaaaatcgtgacaaaaattttcagacacgctcccactaattacaataattttatcatagaaaaatcatatttacaagtaatggaaattgcaataaatccttattgataaaattccctgaaaaataaattttggcatgaaagttactgtgccttaacttctttccacatttcattataaatattatccgtatcatcaccaagatagcgcaggatctcactgtttttcattgccggagagtccatatccgggaacagggcttcattattctgtagttcttcatcagaaagctcatatgcgcctgtatttggagtagaataggtgatgtagtcaaaattcttctttgcaatatcaggacggcataagaaattgatccatttttcagccgcttctttattttctgcatttttcggaacaacccagcagtcgatccagagagtggttccctcttccggaactacatattccaggtcataatccagaccaagttcttcaatctgttcctggatgtaaagcatttcgccagagtaaataacgccttctgcagcttcaccgttgatcattttatctcttacctggtcaataacataagcctgtaccagaggtttctgctggatcagcatatcccttgcttcagctagttcttccgggttggaagtatttaaagaatagcctttctgctttaatgcgatcataaatgcatcgcggatactgttctgcatcaggatctcaccagaaagtttcggatcccacagattagcccagctggttggcttcggaacccctaactgctctaacatctgcttattataaagaatacctacagtaccccagcagtaaggaactgcatactggtttttcgggtcaaaatccttactcatgttccagtaatcatccccgatctgctttgcgttggggatattatcataatccagttcggctaacatattgttgtcgatcattcgttggatcatgtagtcagatggacatactacatcatatttaacgccgcctgcttccacaacaggatacatttcttcgtttgtttcaaaaacgtcatagacaacagaaataccggtttcatcttcaaactgggtaataacatcctcgtcaatatattcgccccagttatatacttttaaggtaccgccgccgctttctgccccgggaactcctaaaatagcgatcgataccacgcaggagcctacagcagctgcagcagcagcccagaatgtacgcattttcatgatagcttagatcctccagtctctgatattagtctttttccggctgtttacggaaatttgcaataagcagtaccaccagcaccaccacaaagataacagtgcttaaggcatacatggaaggacggataccgcggcgtacttcactgtagatcagggtagacagagtattgatgccggcgccctttgtaaagtgggtgataatgaaatcatccagtgacatggtaaatgccagaaggaaaccggaaagtacacctggcatgatatccgggaaaactacctcaaaaaaggcataagccggagaagcgccaaggtctaaagctgcttcataagtagagcggtctgtctgctttaattttggcataacacttaaaataacataagggatgttaaatgtgatatgggaaataagaactgtcttaaatcccagggaaatgccaaaagcgataaatgccagcatcagtgcgatacctgttacgatatctgcatttaacataggaatgttggagatgctcataaaaatatttttggaaacaggtttcatatggctgatagcgatcgctgttacagttccaataacagttgccaccagtgcggagatcattgctactaacagagtcgtgtataatgcatacatgatcgcccggctttcaaacatctgtgtataccagcttaaagtaaagccgccccagtgggtccttgattttgactgattaaaagaaaggaccatcatagtaaaaatcggggcataaaggaagataaggataatcactaaataaaagtcggaaataaacttccgaaaccgttctttgccttttgtcatcagaatgccgtcccttctccgtttttatcgtattttgcgatcatggccatgctgatcaggataaataccattaagaccagagacagaccgcttcccaagtgccagttatttccctttgtaaactcctgttcaattacattaccgatcagcaggatcttgcttccgcctaacaggtcggagataacgaatgtggtaagggaaggcacgaataccatggtaataccgctgataatacctggaaggcttaaaggcagccagataaagaacagagtctgtaaagtattggcgcctaagtcctttgcggcattgatggtgttgtcgtcaatttttgcaagtacattgtagataggcagtaccatgaatggaaggaagttgtataccattccaaggacaatggctgccggggtgttgatcaggttctgctttggcaggtgaagccatgccaggataccgttgatcacaccatttctttcaagtaatgtctgccatgccatagtgcgcagcaggaagttcatccacataggaaggatgaagataaatacaataaagccgctggcagagctgcctcttccgcgaaggatcatggcaagaggatatgccaggaccagacagaggactgtactgataagagacagtccaagggacagccataaggccttccagtgatccgggctcatgatggctgtgatgtttgccagtgtcaggttaccgtttttagttgtaatgccgtaccagaaaataagtgccagcggaatgatggtaaaaccgatcatccagatcagataaggaccggagagcagtgcccgtccaatagccacggatttttttttatcattattcattgactcccagtgcctcctcatcttcagaagcaggcttattcatgatctgaatgtcgaaaggatctacatgaagtcctacctgctggccaactgggaacatatcggtggagtgtaccagccactcaaaaccatccggggtagtcacttccatttcatagtgaacgcccttaaagatcaggtgggtgacaacaccctgaagtgtgccttcttccggctttaacaggtcaatatcctcagggcggatcacaacgtctacaggtttgttgtttccaaagcccttgtcaacacaggcgaattttgctccgaagatctcgaccagttcatcatggatcataaggccaggtacaatgttgctctcaccgataaagtcggcaacgaaagcattttccggctcattgtagatctgctccggggaacccatctgctggatatagccctggttcataactacgatggtatcagacatagtaagtgcttcttcctggtcatgggtaacatagataaaggtaatgcctaactcatttttcagtcggatcagctcatactgcatgtcctggcgcagcttcaggtccagagcgcctaaaggctcgtcaaggagcaggacacgcggctcatttacaatggctcttgcaatggcgatacgctgctgctgaccgccggaaagagagataacatcccttttttcaaaaccggacaggtttaccagctttaaggcatatttgatcttatcgtcaatgtagctctttggcttgtttttgatctttaagccgaaagcaatgttttccgcaatggtcatatgtgggaacagagcgtatttctggaatacagtgtttaactggcgcttgtttggcggcagcttggtaatgtcctgaccgtcaaaaataacgtttcccttatcaggcggggtaaaaccgcctaaaatacgcagagtagtggattttccgcagccgctgggacccagtaaggtcacgaagctgttttcttttatagaaaggttcaggtcatctaagaccatttccccgtcaaagctttttgaaatatgctgtaaatcaatcaatggctggctcatgtgcgcagttctcctttttcgtaggtgtggtgatccgttctcccaaagtttcgggaggacatactaaaagcttggtggtgagctgacccagatcagggttgccccgtttttactggacaggaaatgggttttgtcagctgtataataaaaggattccccttttttggctttataagtcttatttcccagatggatagacacagctccctgaaggacgtagccaaattcttctccttcatgaggtgtgtccggacaggtagagccaccggcctgtaaggtcaggtaaatgggctctatggtatttttctgggcattgggaatgatccatttgatttcgtttttgtattcggtgtcttccttaacaaaatagtcctgttttccgaatacgatctgttcatcaggagcctcgttgaaaaactctccgatactggtaccaaggcactgcaggatgtccataagggtggtgatggaaggggaggtcagattgcgctccagctgggaaataaatcccttggaaagctcggaacggtccgccagttcctcctgcgtcagtccttttaaaacacgcagttctttcagtttgttgccgatatccatgatatcctcctgttttacctgtaagtaacatttcttatacacaaagtttacaaatactaactgaatataaaaataagcaaaaagtttagtattattaaacaaagtcgagttccattatacattaaatgagaatagtgtcaataccttttctgaaacttacaggttaacaaataattaaatgtatggtatgatgaacgcatggaaaaataagcgcgaacggaaccgtctgcagcagcagacaacagagcacattggtgcgtgtccgtgagtggaaaaacacagacaatatccagggaggtaagctgtatgagcggtaagtatatggcgtatgtgggttcctattcctatacgggaaaagcaaagggaatcaccgtatttgatgtagatgtagaaaatggaatgtttaaagagcgctgcgagatcgaagtggacaattcttcttatgtaattgcatccagtgacggaaagacactgtattccattgcagatgaaggcgttgtatctttccgtatccttccaaacggaagcctggcacgtttaaacagtgccccgatccgtggaatgagaggctgccacctttgtaccgatgaagaggataaatatgtattcgtttccggttatcacgatggaaagactacggtattaagtctgaacccggacggttctgtaggaaagatcgtagacggtgtatttgacagaggatacggcagtgtggcagagcgtaacttccgcccgcatgtgacctgcaccagaagaatgcctgacaaccgctttgtactcagtgtagataatggtattgaccaggttaaaatctaccgttttaatgataaagaacagagattagtccaggtagacgccatccgctgtgagttagagtctgcgccaagacatttccgttacagcaaagacggaaaattcatttatctgatgtatgaattaaagaaagcaattgatgtatacacctacaagactggagacagagcacctgtgatcgaaaagatccagaccatttccaccacttctaccaagaagccggacaacctgactgctgcctgcgccatgagaatgtctgttgaccagaaatacatatattgcaccaatgcaggagaaaataccattagtgtttacaagagagatgaggagacaggccttctgaccatgatatgctgtctgccgatcagcggcgcatatccaaaggatgtagctgtatttccggatggaagacatattgcttctgtaaaccatgacagcggcaccataagtttctttaaagtagattatgaaaaaggccttctggttatgagtggaagaagtattcctgtaaatgaacctaactgctgtgccattgtaaaaataggagattaataacatgtcaggttcagtatacggaacgatttttaagataagtacctggggagagtcccatggggcaggcgttggcgttgtagtggacggctgtccagcaggacttcctttaaatgaagaagatatccagaaatatttagaccggagaaaaccgggacagagcaaatttaccacagccagaagcgaaggagataaggcagagatcttatccggtgtttttgagggaaaaacaacaggaacaccaatctctattgtgatccgcaacacagaccagcgctcccgtgattacagcaatatcatggatgtataccgtccgggccatgcagattatacctttgatgaaaagtatggctttcgtgattaccggggcggcggacgttcttccggaagagagaccattggaagagtggcagcaggtgctgtagcagcaaagctccttgaaagccttggaattacggttcaggcatacaccagtgcagtgggacctgtaaagattgaccattctaagatggatctggaagaaatttccaataaccgcctgtatatgccggataaaaaagcggcagcagaggcagagagttatctggaagatatgatacagaggaaagactcctgcggcggtgtgatcgagtgtgttgtaaacggacttcctgcaggcgtaggagaacctgtttttgataagctggatgctgcgctgggaaaagccattatgtccatcggcgctgtaaaaggctttgaaatcggagatggctttgaagcagccgcctctttaggctctcaggataacgactgctttattataggaaaagacggaagaccatgtaaagtcaccaatcattccggcggcaccttagggggcatgagtgatggaagtacgttggtgatgcgggcggcatttaagccaacaccgtctatttcacagatacagaaaacagtagaccgctatggaaaagagcgggagatcgagatcaagggccgccatgacccggtgatcgttccaagagctgtggtagtagtggaagcaatggctgctcttacagtggcagatctgcttttgatgtccatgacatccagattagataaaataaaaaagttttttaagaaagaggagatttagtattatgaagatcgcaatgggaaatgaccatacagccattgagctgaagaacatcatcaaggaatttgttgagagcaagggatacgaagtgatcgaccttggaaccaacagcacagaaagctgcgattatccggtttacggtgaaaaagtaggacgcgcagttgcttccggtgaagctgatctgggtattgctatctgcggtaccggcgtaggtatctctttagcagcaaacaaggtaaaaggcatccgcgcctgcgtatgcagcgagccatatactgcaaagctttccagaatgcacaacaactccaatgtccttgcatttggcgcaagagtggtaggcagcgagttagctaagatgatcacagaagcatggctggatgcaaagtttgaaggcggacgtcatgagcgccgtgttcagatgttaatggatattgaaaacagataagtaacagatctgcggatgtacgcagtctgtaaggcagtttcaggcgtttcggaccaatagtttcggagcgcctgaaattatatggacaggttgtatggggaaaacaaggaggaaggcaaaatgggagtacagttagatgaaacagagaaacgtattgtggatctgatcgaggcaaacagagatgagatcatagcttttgcaagagatatgtatacacatgcggagcttggatacaaggaatttaagactgcggaaaaatttacccggttgatgaaaaagttaaatctccctgtaaaagagcatctggcagttacaggcgtaaaggcatatttaaacgaagagaaaaaggacaatgtaagtctggcgctgatcggggaattagacgctcttcgcattccggaacataaatacgcaaatccggaaacccaggcagcccactgctgcggtcatcatgcccagatggcaggtgtgatcggggcggctttcgctcttacagattcgaaagttaaggagaccttagacggtcaggtggtattttttgctgttcctgcagaggaatatggggagatcgaatttaaaaaccagctgacaaaagagggaaagatccgctatggcggtggaaaatgcgagttgatccgcattggcgcttttgatgatattgacctggatatcgtacatcacacagaagatgaggatatctgcgtaggtgctacttctaataacggttttgtttccaaggtcatccgctataaaggagtggctgcccatgcagcaggtgcgccatataagggaattaatgctttaaatgcggcttctcttggtctttcagccttagcctatcaaagagaaacatttaaggatgaagaccatgtaagagtccatcccatcattacaaaaggcggcaatctggtcaatgtagttccggatgaggtagtgatcgaaaccctggtgcgtgcctcaaataaagacgccattgcagacgcagcctttaagaccgaccgtgcatttaaggcaggtgcagctgccattggagccacctgccagatcacaacagccccagggtatcttccaactttaaaaacaccggcagatgaagatgtacttgcggcagctaagatcgcggcagccaccagcgaaaaggagtataccgtagtggagaaagatatcactcatcattctggcggttctacggatgtaggagatgtacagcacatccagcctgtacttacttttaatacaggcggaaaagtaaatggacttcatacagtagactttgatattgtagatgaagaactggcttatattgtcactgccaagatcttcgccctgtctgcatatcgcctgcttagaaacggggctataaaggcaaaggagatcgttaagaattatcatccggtatttacaaaagaagagtatattcagtatatggactcctttttaacttatgaggaacagaaaaactgacggaaaaatgatgaagcaatgaaacctgcttgacagaatgacctccgttctttatactgaaaattgtattaggcagaagccttgatccacgtctgttagggaaaattccctgacaggcgtgtttttttatgatgaaagtcccgaatattggacgggtaagagaggggaaaacaaaatggaaacaaatacagaaaactggaaagaccatttacaaaaaggcggctcgctgatgatcgtcatactgggaaatatactgtatgccctggctgtaaagctgtttctgatgcctgcgggcctgcttacaggggggacgacaggtatcggtctggcattaaacaggagttttgggatcccggtagccacctttgtacttatatttaatgtaaccatgcttctcatcggctggaaggtcatgggacgaaaatttgctctgacaaccgttgtaagtaccttcgtatatccgattgcactgggattttttgagaaagtctttggagatctggtgcttacccaggatctgtttttatgtaccatcttttccggattgggaattggcggttctttaggcattgtgatccgtgcaggggcttccacaggaggaatggatatcccaccgctggtgttgaaccattactttaaaattcctgtttccgtttccatgtatgtgtttgatttctgcattttactggcccaggcagtgggaaatccaccggagaaagtattgtatggcctgatcctggtaatgacatatacactggtgttagataaactgatgcttatgggaaccacccgtacagaagtaagagtcatcagtgaacgtgcccaggagataagggaagctattttagcggaaatggaccgcggcgttaccatgctttccggcgagaccggctatttaaaacaggagacccagatgatcttcagtgtaatctccaacagggaggttccaaagatcgaaaagctgatccacaccattgatccggaaagctttatggtagtaaaccgtgtcagcgaagtaagcggccgtggattttccatgaaaaagcggtacagataaatttcaccgttgacattttgcagtctgctgtgttattttaagtttagatatcagggagtagttcacacagatttttctgtgttgtgctggtcgtcatcacgcggcaggataatgaagatacattaggcctgcagccgggcagtacacatgtatatggagcgagacttttattgcatatttttggtgcaataaaagtcccgctcttttgtttttctggaacatttccgatcatactaaaacaaaggagagaacattatgacagagaaaaatatgtggaacctgtcaccgcaggaggcgctaaaagcctgtcaggcatcagaacagggactgactacagaacaggcagaaaagatccgtctggaaaaaggggaaaatgtactcttagaggaaaaaaagaaaagtgcttttcaggtctttttagaccagtttaaggatctgatggtagtgatcctgatcggtgcagctatcatatccatgttttctggaaatgaagaaagcaccattgttatttttgcagtccttgtgatgaatgcggtccttggaactgtgcagcatatgaaggcagaaaagtccttagagagtttaaaacagctgtctgcgccggatgccaaggttataagagatggcagaaagcaggaaataccggcaaaagatgtagttccgggggatatcctggaattagaggctggggacatggtggctgcagacggaaggatccttcataattattccctgcaggtcaatgaaagctcccttacgggagagtctactaatgtagataagcaggagatggcactaaatggagaggcagcgctggcagaccgcaccaatatggtctattccggcagcctagtaacttacggaagagccactgttcttgttacagcaacaggtatgaatacggagatcggtaaaatagcagggctgatgaacggggcagaagaacggaaaacaccgttacagaaaagcctggatcagttcagtggaaaactggcagtcctgatcatggtagtctgtgccctggtgtttgccctttgcatgttccggaaaatgagccttctggatgcactgttatttgcagtagccctggcagtagcagcgatcccggaagcactgacttccatcgttaccattgtccaggcatttggaacccagaaaatggcaaaagaaaatgccattatcaagaaattaaaggcagtggaaagcttaggctgtgtatctgtgatctgttctgacaaaacaggaacactgacccagaataagatgacggtacagcaggtttatgtagatggaaaggtgatcgacgggaaagagttagatcttacagaccagacacagcgttatcttctttatgatgcagtactgactaatgattccagcattgtagacggcaaaggaattggtgatccgacagaatacgctcttttggagatgtttcgtaagatccaggtccttccggacagctattttggaaaaatgggaatgcatgaggatgcgttaagaaaggtaatggaccgtatagaagaggtcccttttgactctgaccggaaattgatgagtacaaaataccggatccacggggtgcctacgatccttacaaaaggtgcggtagatgttctgttagaccgctgcgtatctgtgcgctatggtgatgggatccgtcctatgacagaggaagaaaaagaaaagatccgcctgcagaaccagcacttttcagaaaatggtcttcgtgttctggcctttgcctataaggagtccaatgaaatgctttgcgcccaggcagaatgtggttatgtattcctgggactgatctccatggtggatcctccaagaccggagtctgtaagggcagtggcagaggcaaagcaggcaggcattaagacagttatgatcacaggcgaccataaggtaacggcaacagccattgcaaagcagatcggcatttttgaggaaggggatctggcacttactggtatggaattagatgccatgagtgaagaagaactggatcagaagattgataaaatatccgtttacgctagagtttcaccggaaaataagatccgcattgtagaaggctggcagagacggggaaatatcgtttccatgacaggagacggtgtgaatgatgccccggcactgaaaaaagcagatattggtgttgccatgggaattacaggaacagaggtttccaaggacgctgctgccatgatcctggcagatgataactttgctacgatcattaaagctgtggcaaatggaagaaatgtatacagaaatattaaaaatgcagtgctgtatcttctttccggcaatacagctgctatctttgctgtattatatacttcccttatggctttaccggtgcctttcgctccggtgcagttgctgtttatcaaccttctgactgactcccttccggcccttgccattggcatggaaccggcagatgaaggccttttaaaagaaaagccgagagatccgaaagaagggctgatgacaaaagatttcatgatccagatggcagcccagggtgtgttgatcgcagcagtagtcataactgctttttatctgggattaagaagcagcacagcgatggcatctaccatggcattttccactttaacactggcaagactgttccacggatttaactgcaggggaaagaaatccatttttaaactgggctttggcaccaatccttacagtctttacgctttcggagcaggtgctctgcttttaggactggtgattttcattcctggacttcaccgtctgttccaggtacagagtatgccggtggtatctctgctccaggtggcagttttagcgttcatcccgactcttatgatccagatgaaacggctgatctgcaaaaaatgatgtgcaaaaacaattgtaaatacagagcagatctatcggaaatgtaaaaatttgtaaaaaacacaaaaacaacttgaaacctactggaaaagtaggcaatataaagggcagctattaagttagctgctcttttatgttgtcatgcatctggaaaaagcttccagcggcaggttttataagttttgtgcgaaatgagcaaaaagaaagtgcttacaaaaaataagttgtgcaaagtataaagaaacttgttgacattgggccggataaggactacaatggttgtaataatattaaagataatattaaaaagaatattataggaggattaataaaatgacaaagcgcgaaagagtaattgcagcaatcgaaggaaagaaagtagatgccatcccgtcttcattctctctgcacttcccaaagaaccaggcagtaggtgatgaggcagtagcagctcatctgaaattcttcaaagagaccgatactgatatcgtaaaggttatgaatgagcatctggttccttactatggaatgatccgcacaccaaaggattactatgaactgatcccatccttcagcagaaacaccaacatcatcgaagatcagatcgaaatgaccaagaagatcatggacggagttgataaggacgctttcaccatgggtactttacatggtatgtgtgcttccggtatccatccattagagaagatgggtgaaggctacaactacgatcaggttcgtcagatgcaggtagacttcctccgttgggatgagaaaaagatgttagactctatggaaagaattgctgatggtatgtgcatcctggctgaaagatacatcaaggacgcaggcgttgactctgtatactatgcaggtttaggcgcagagaccagatggtacactgatgaagaattcgcaaaatggatcaaaccatttgacttaaagatcatgaaggcaatcaaagatgcaggcggctactgcttcttacatatgtgcaagagcggcctgaacatgaagagatacgatgaagattacgctgcactggcagatgttgtaaactggggtgtatacgaagcaccaatgactctggcagacggcaagaagcagttcccgggaaagaccatccttggcggattagagaacagaagcggtgttctggtagatggtgacgagtacgacgtaagaagagaagttatcaaggttgttgagaacttcggcagagaaggatttatccttggcgcagactgcacactggcaactgagcaggatcttaagctggtaagagcagcagtagagcaggcaagaagcttataatttacagatcttaagaaaagagggatgcaaatgctcagatatataggaaaaagaatattaattgcaatacctacttttttggggatcacggttttagtatatgtgctttcttcaatggctcctggtacacctctggaaatgatcttcaatgatcctaatgccacagcagaacagatggcagcgatgaaagcaaagctgggactggaccagccggtcatgatacagtattttaactggctggtacagctcctgcatggaaatatgggtgcatcttaccgaacaggacacgccgtttgggcagatatctccgagcgtatcggaccgacactgctccttaccatgtcctctctggtgttctccatcctgatcgcaattcctctgggaatcatgtccgcatacaagccttatacagcctgggactacatttcctctgcgttttcctttatcggagcagccatcccaaacttctttgcaggactggtatttgtatatctcctttctgtagtattgaagatcttcccaagtggaggtatgtacgatacatcaggtgtcagaacccttccgatgctgttacatcacctattccttccaatgctggtcctttccatccagcaggtaggaagtctgatccgtcagacccgaggcgctatgcttgatgtacttcaggaagattacatccgtactgcaagagcaaaaggcgcgttagaaggcagagtgctttttaaacatgctcttcagaacgcatttatcccgatcatcacccgtattggtatgatgatcccattcttagtaggcggcgctgttgttacagaacagatctttgcatggccgggacttggaagcctgatggtactttccatcaactcccgtgattatccggtgatcatgggtatcactgttttcattgcagcagctgtactgatcggtaacatgatcgtagatcttgtttatggtctcttagacccgaagatccgttattcgtaggagaggagtagacgtaatggcgaaagaaaataacagaagctcctatttcggggacgtagtcaaaaaattcctggcccatagactggctatgatgggcactatcgtactgatcctggaagtactggcagttgtcttccttccatcgatcatgaagttagatccttattccatggactacatggcatttggcggtgctccttcagctgaacatctgttaggctgtgatgacgtaggaagagacttgtttgccagacttatctttggtggccgtgtatcactgatggttggtatctgttccgcactgatcagtttggccatcggtgttccgttgggactgtttgccggatatttcagaggcgcagtggaaaccgttatcatgagatgtgcagacatcttcatgtcattccctaacatgatcctgatcctggttttagccagtgttttaggacagtccgtaacaactgttacattagtaatcggatttcttggctggacagagtttgccagactgatctatgcaagcgtattgtctgtcagggaaaaggattacgtagaatcagcaaaagcaattggtgcaaagaacggcacgatcttacttcggtacgttctgccaaactcatttgcaccggttatcatttcctttacattcagaaccgctcaggcgatcattacagagtcatccttaagtttcttaggacttggcgtacagcctccggaagcttcctggggaaacattctgtattatgcacagtccatcagtgtcctgtccacaaagctgtatatgtgggtacccgccggtgttgtactggtccttactgtattgagcattaacttcattggtgacggcatccgtgatgctcttgataccaagatgaagatttaacgctatatagttttatgccctctctgagaggacatcttacgaaaaggaggaaaaacatgaaaaaaagtaaccttttaaagaaggctgtgtcagtgttattagtagcatctgcactggcaggttgcggcagctctgcatcacagacagctaccacagcggctccggcagcagctggaactgaaacaagcgaagcagctacagaagctgccagctcagaaagctcagcagaacctggcaccattaccatggcaatggtttctgcatgggactccattatcccatttgataccacaagttcttactcagatgcagttttggatctgatctatgacaagctggtatacttgaaacaggatggtacttatgagccaagactggctgataagtggagcatgagcgatgacaacaaggtgctgactgtacatttgaatgaaaatgcaaaatggcaggatggcgagcctgtaactgcagatgacgtagtattcaccatgcaggtttacaactccccaagcgcagctgttgtaagacagaacaacgtaagcccattcgcaggatttaaagagggcgatgacagccttcaggtaaaggcagtagacgagcatacagtagaaatgacctgtgcagagcctaccaatatggatttcctcttttttatcaagttcagagatatctatatccttccaaagcatctgttaggcgatacaccatatgctgatatcagaaacaacagctactgggagaaaccaatcggttccggtccatgtatctatgagagccagatcagcggcgagcgtatggaattcaaggcaaacaaagactactacttaaagactcctcagtgggatcgtttcgtagtaaaagttgttgctacacctagccttctgtccggtctgatgaacgatgagatcgacatcctggctggaaacgttgcttcccttcagttatctgactgggatatggcacagcagcagcagaacctgacctgcgtatctacagagtctgtaggataccagtacatggcgatcaataccgaaaaagattatctgccaccaaaggttagacaggcaattgacatggccatcaacagagacgcgatcgtttccggtctgttaaagggcgaaggcgagccggcatttggaccatttgcaacaagccacaagtactatgatgatgtagtaaacgtaggatacaacccagaaaaggcaaaagagctgttagcagaagctggctgggatggttcccacgaattagtattctctgtacctacaggtaacagcatcagagagcaggctgcagttatcatccagcagaacctgcaggagatcggcatcaagacaaagatcgagtctgctgacttcgcaacccacttaaccaaagtaagagaaggaaactatgaccttggtctgatcggttccggcggttcacctgacccatctgagtgtgtaatcaacttcaagccagatcacatcaacaacttctctcatctgtctgactggaccatttacaacaccggtgcagaaggcgagcatgcattcaactttgaagacagaaaagttaactatgacaattatcaggaactgctggtagagcaggtaccattctgcttcctgtatttccagaacaacctgtttgcttacaacaacagaattggtaatgtaaaagacaaccaggattactctcagttaaacagagacgtatggaactggaccatcgaaaagtaataaatgtttataatataggcattgcccgccaccttgtgtggcggtgcagaccgaagcagaaggcaaaagctgctccggtctgcagcaccacagaagaggggtaatgcgttcacaaaaagtttgaaagaacgtgtagcgaaatggaggatgaacatggaacctttattagaagtgaagaatttgaaaaccagctttaaaattggcaagaagtgggttcctgccgtagaacaggtatgctttcatgtagatccgggagagacactgggcatcgtaggcgaatctggctgcggtaagagtgtaacttccatgtcgatcatgcgccttttacctaaggcaaccacaaaaatagaggcagatgagatcatcctgaacggaaagaacattgcaaactattcagataaggaaatggcccaggtgagaggaaccggtatcggtatgatcttccaggactccatgacttccttaaacccggtaaagaccattggaaaacagctagatgaagcatttatcgtacatcacagctgtgataaaaatgaagcaaaaaaccgcagtattgaaatgctgacaaaagtaggtatcccttctcctgaaaagagatatggagaatatccacatcagctttccggtggtatgcgtcagcgtgtgatgatcgctatggcgctggcacaaaatccatctcttatcattgccgatgagccaaccactgcactggatgttaccattcaggcgcagatcatggaactgatgaaggaaatgaaggaaaagaccggagtttccattatgctgatcacccacgatatgggtgttgtagcagagatggcagacaagatcatggtcatgtatgcaggtatggtcattgaatatgcaactgcaagagagatctttaaagatccaaaacatccttatacaaagggacttctggcatctattccacgaaaagacaaagatattgaccggctttacaccattgagggaaccgtaccttcccttacttccatgccaaagggatgtcgtttctgcgaccgctgtacccgtgcaatggaaaaatgtcggaatgagcagccaccaatgtatcagtttggtgagagaagcgtcaggtgcttcctgtatgaagataaaggcggtgtaagcgatgaaagataatgtgatcctggaagtaaaaaatgtagagaaatttttttatggaaataaaaaactgtttcagaaagacagaccggttgtaaaggctgtcaatgatgtttcttttaccattaatgaaggtgaaacattcggtatcgtaggtgagtccggatgtggaaaatccactctgggaagaacggtcatccgccttttaaatccaaccagcggacaggtcctttataagggaacggatctggcaactctttccggtgaagagatgcgtaagctgcgccaggagatccagatcattttccaggatccttatgcatccttaaacccaagaatgacagtcagagagctgatccaggctcctcttgatgtatattctcatgagtcagaagcagaaaaactggcaaaagtaaagaatatcatggcgaaagtaggtcttcgtgaagaatacatgagtaaatatcctcatgagttctccggtggacagagacagagaattgttattgcaagagcgctgatcttagagccgaagttcattttctgtgatgagccggtatctgctctggacgtatctgtccgtgcacaggtattaaacctgatgaaggaccttcagaaagaatttaacttaacttatatgttcatttcccatgacttaagtgtggtacgtttcttatgtgaccgcattggagttatgtatttaggacgtatggttgagatcgcagacagacaggaattatatgacaacccgatgcatccatacacaaaggcactgctttctgccattccggtaccggatgtagatgtaaagcatgagccaatgctgttagagggagatatcccaagcccgtacaaccctccaaagggctgtctgttccacacaagatgtaaatttgcaatggaatgctgcaagaccgaagtgccgcagatgcgccagatcggagaaaatcactgtgtagcgtgccatttatatgatgatgtaaaataaaaacaagcgccgctataagcggcaattgttttttgataccaaatttatataaaaagaaagggaaaagcaatggaaaaagaatggattgaaaaacacattgatgatatggttcaggatatatgcaaattatcagagatcccaagtgtaagcgtaaaaacagaagatccggatatgccttttggacaggcatgcttagatgcccttcatgcagctctggatttaggaaaatccatgggatttgaaacatttaaccatgaaaattactgcggaactcttctctggaaaggggaaagtgatacagagatcggtttctttggccatgcagatgtagtacctgccggaaatggctggacatgctgcgaaccatttaagccagttgtaaaagacggccttctgatcggaagaggcgtaagcgataataagggttcctttatgactgccctttatgctttaaaatatctgaaagaacagggctataagccaaaacacagcttccgctttttctttggatgtgacgaggaaaagggaatggccgatgtgcagtattatgcgaagaattataaagagccggcattttctgttgttccggacgttatgttccctgtatgcaacggtgagaaaggaattctggaatttgatgctacccgtccggtaaagagcagcaagctggtaagctttgagtctggtatcatgtccaaccaggttcctgcagaagcagttgcagttcttactttaacaggagaagagactgcaaacgtaaaagaggttgtagaagcagctggcggcacctgtgaaaatcaggctgacggcagtgtgaaagtatatgtacatggtattcctgctcatgcagctttcccggaaggttctgaaagcgcggaagtaaaaatggcgggactgctgaaaaaatcaggcgtgttagatgaagatgcagcaaacttgatggatgccatctgtgagatgtttggtgattactatggagcaggactgaacattccttttgaagatgaaggttccggcaagctgactcatgtaggcggtatgtgcaagctggaaaatggtgttttctggcaggatgtaaatatccgttataatgtaacagctgtttatgaagtactgatggaaaacatcacgaaaactttaaaggcacatggctttgaactgacagaagcccatgactccgcgccatgctttacagatcctaaatccaaggaagtacaggcattaatggaagtatgcaaccgcaatctgggaatggaattagagccatatgtaatgggcggcggtacttattccagaaagttaaaacatgcagttggatttggacctggcattcctggaaaagcaaaacgctttggtacagaaagaggcggtgctcaccaggcagatgaatatattgagatcgaacatttaaagaaggcttttgtgatctacgtagaagcgatccagaaactggatgaagtggttgattaaaaacttgacaaaatcggtttttaagtagaaaatagcatattgggtgcgaaagcactactaaatatgtagcttaggggaatgtatgcaaaaagaaaccttaaaagagagagtataccgggggatttacgaagctgtgacaaacggcgaatatagaccgaatgatattcttactgaaaatcaaatgattgaaaaatttggtgtgagcaagtctcctgttcgtgaagcactggtagaactctgtaaagatggagttttgatcaacattccgcgtatgggctatcaggtgcgggcagttacgctgaaagagatcatggatattctggaattcagagttgatgtggaagtaggaggccttcgcaaaagctttcctgttttaacccgggaaaatataaatatgcttcggatgatcgcagaaaagcataatgcagatgaggaccggatcgtatcaaacaactggcagagaaattatgagtttcacacctatctgtattcattaaacaacaatgtttacggccatcaggcattacagcagatgatccaccagtgttcccgttatatctcacagtatttcctgtctgcgtggcagagaaaaaatgagtctaatggacgttatcacatggccgttgttgatgctctggaaaaacagaacattgaagaggcctgtgtgtatctggaaaaagatatactggcagtgaaggaagagatcctggcactgcattctatgaacatttaattgaatatcatttatgtacatataaaaagaaccggttcgttgtgagccggttctttttctttaagaattcaaatgcattgcaaaatcagattagccaaagtatctctttaacagacctgcgaatgctcttccgtgacgagcttcgtcttttgccatctcatgaacagtgtcatggatcgcatccaggttagctgcttttgctctcttagccaggtcaaacttaccagcagtagcaccgttctcagcagcaactctcatttccaggttcttcttggtagaaggggtaacaacttcgcctaacagttcagcaaacttagctgcatgctctgcttcttcgtaagctgccttctcccagtacagaccgatctcaggatagccttctctgtgagcaacacgagccatagccagatacataccaacttctgaacattcgccttcaaagtttgctcttaaatcagccataatatcttctggggaaccctgtgcaacacctacttcgtgctcgcatgcccagctggtttcgtcagcagcctgctctttgaacttggaagccggtacgccacactgtggacatttttcaggtggattttctccttcataaacataaccgcatactgtacaaacccatttcttcataatgatattctccttttcgtttttttgatttaatgtgatcggaaactttagttcctgtttcgtttgatctcttgtaatcaataatagtaatgattactgatattaatataatgcattttgtcttgtttgtcaagagaaattttcatttacttttataaatttctctttttttactgctttttagctgcttttcttaagagtattctctgtctcttctttttccatgcatgagtagcatcttccatagaataaaatggaatgactgtcgatctttccaggggcagcagcctgaacggaagtgttcagatcagccatttcgtccagttccatatcatagacctgtccgcagtctctgcatacaaagtggtaatgtggcgccacgtttccgtcgtaatggtccgggccgtttccacaggtcagtttcaggatctcacccgtctccaccagcaggttcagatttcgatatacagttccaagactgatatttggaaattcttcccggatactggcgtatagggcgtctgccgtcggatgatcgtgtctgctcatcaggttggctttgatggattctctctgacggctatactttaatgttttcataggcgtctcccttgttgatgaaatttaataatgataatgattactgttttaatatagcaaaaaagaaaacgaaagtcaagggtgatcttcgttttcttttttgctcccaggtcatcagattgcatctgcatttgacggaagtcctgcggcagaagggatatgctccagtgcaatgcggataaattcgtgggtggcacgggacatatagtggcctttgtgatagccgatagcaagggtgccgtgggctctggaataattcaaggaaaacaggttcagtcctgcctgtcccataagggagtctttatatgcgtttaaattctgtctggtggacatgaacatacgggggtagaaggtaatccccattccctgggcactgagggccagaaccgtctcaatattttctgtttccagaacaatatggggagagatctgggtatcttcaaagatctcatctgcaatggtacgtacccggtttcccttttttaacagaacaaaagggcagttttccaaaaggcgcacatctgcagactggtaaagacttttcttgatctcctcaaaacggtcgggataggcttttcggatcacttcgtccgggacaactaaaaggatctcttcctggcatatgggtacagtagccacattttctgctgtaaagggaagcaggtcgatcatcaggtcgatgtttccgtgaagcaggtcatttgccagctcactggaatttccttctgccaggtgcagttcgatccccgggaattccctctgataagtaggaaggatctccggaaggataaagcggcctctggtgtgggaaacgccaatggaaagctgtcctgtggaaaagtccttgatatctgaaatttccttatatgtttcatctctcaggtccagcagttcccttgcccttgtttttaacgcctgtcctgcataggtcagtgtcaatggagaggtgcggttgaacaaaacaacgtcaaattctttttccaggttggaaatgtggttgctgagtgactgctgtgaaatataaagccgtttggcagcgcgggtgaagtttaattcctccgcagccaccagaaaatattccaggttcagaaagttgatcatagggcagtgttcctttctgcggaagcgcggaaagcttcgttttcagaaagcagttgttttaatttagggataaaagcagccgccttttctaaagaagtattaacgatcagttcttccggaaagtgcatttcttctaaaaatgcatgtgccagactgtgatttcctacgtctgcctcgcagtgggcatcactgtcaatgatgatagaggtgccgtagcggatacatgcagctaaaagttctttataattgtcctttgcaccttttcgggcgcctaaaggatttaaggaagtattatttacttccagtaatttgtggtttctggcagctgctttagccacttcggtccagtcagcaggcagccgggagtcatctgggtgtccgataatgtttacataaggattttccagtacattcagataggctcttgtgtagtcggcaacagaaccattgttgtcgatgcatggggtatgcaggctggcaactgcatagtcgatcttttttaaatagtattcatccaaatccacatgtccctcaaagtccagaatgttcagttccgcgcccataagtaccgggacaccacggatcacccttggaaggactttaaagttagtaaaataaaattcatggcaggtaccgggcatagacggagcatgttctgaacagccgtaaacagccagtcccttatcagcagcagcctgtgccatttcatataaagtattgtaagcgtgaccgctggcaatggtatgtgtgtgaaggtctaaaatatctttcatggatgtaaaatacctcttaaattataatgttggggtcaaaaggtattttgacccctctgataccgaattgctacgtgctttgcactctcgcaattctaaaaacattcgtaattcgctcatttttcttcaaaaaatggctgcttactcatgtttttggcgggtcccaagttcaaaaatcctcctgcaagcaagcttgcgtcggattttagatcttttgaccctggtatcaaattatgaaattatatactagagcaagtatagcatagcaaattaagggagaaaagagcgaaaaaaagaaaaaactggcgcaattttcccaagaaaactatggaaatgtgtaactatggtaggttataatgtaatgagtgaagggaaaaacaagcggctgcgaagcagacatttgttgcctagcatatcgaggaggcgccagtgacgcgtccgatgattttcacgaaccattaacgaatgaaccgtctgcgtcagcagacagtggagcgcgtcagcgcgggggtcatgagtttacgctagaaaatagaacagcggaggaaaaaacaatgaacgaagaaatgaacaaacagcaggaagcagaagtaaaagcagaagcaccagtagagaccatggaagactatgctgcagaactggaagcatcttataaagcatttgacgagagacattttgaacttccggaaacggatgatgcagaaggcgaaaagtgggctgagtttgcacagatgatggcagaccgcactgtattaaatgtaaagatcgctgaagcagtaaaaggcggcgtagttgcttttgtaaatgaagtaagagcatttatcccggcttcccagctgtctacagaatatgttgaaaagctggaagactggcagggaaaacatgtggatgcagtgatcatcacggttgatccggaaaagaagagattagttctttccggccgtgaagtagaaaaagaaaagaaggcagcacagcgtaaagagcgtctggctcagtttaaggctggtgatgtagtagaaggaactgtagataatattaaggactacggcgcatttgtaaagctggcagacggtattgacggactgttacacatttcccagatcagcacccagcgcattaaacatccaggtgcagtcttaaaagaaggacagactgtaaaagttaagatcctttctattgcagacggaaagatcagcctgagcatgaaggcactgatcgaacaggaaactgaggaagaagaacacgaaacatttgattataaagaaacagcagctgcaacaacaggactgggagatctgttaaaaggactgaagctgtagaaaggggccgggatgtcagtaatccccaaaacaaaagatcaggtagatcagtggcggtccgtgatgtttctgtatgactcggctttaaagaagctgaatacaaagatcgagatactgaacaacgaatttgtcaaccgctatgaccataacccgatcgaacatattaaatccaggctgaaaacagcagacagtattgtaaagaagctgaaaaaagacggttatgaagtgaccattgaaaatatgatggatcatttaagcgatattgcagggatccgtatcatctgctcctttacatctgatatttaccagatcgcagatatgatcgcagcccagggagatattaccgtacttcatgtaaaagactatatacaaaatccaaagcccaacggatacaaaagttaccatatggtagttacagttcctgtatatcttgctgacggacctgtacagaccaaggtggagatccagatccgttccgtagcaatggatttctgggccagcttggagcataagatcgcctataagtttgagggcaatgcgccggaaggactgctgcgggaattaaaagaatgtgcagatgtggtagatatgctggataaaaagatgttttctttaaatgaggcaattacagcctatgcaaaagaacatccggaaacagacccaaatcgggaataaatatgaaattatttttaaaattaacagataatgtgatcaaacagaacctgcgccagctggtattatttactttcttataccggctggttgcaggtatattctatgttaagacggtaaatggtattttaaggttctcactgcatatggcagggtacagttaccttaccataggcaatctgagggcctttctgctgcatccatttactattccttttgtgatctttatccttcttcttggaatgatctttcttcttattgaaacaggggcaatggtaacagcgtatcattcttctatttatttaagaaagatcagtgcagtatccattttcctgggaggactttccaaggcaaagaatgaactttgcagaaaaaacgggaaacttctgttagcggctctgggaaattatatcctgatgaactgttattttctggtacggatcctgacccgtatgaagccggtaaactttgttttatatgagatcttacacgcagcagggaccagaatggctctggtagtgggatgcgttcttctgactgtattttctgtcccggctatgatggtgtttttcgcctgtatgctggaacagaaaaatttcagggacggagtcagagaaagccgggagatcttaaagggaaaatggcccagggcggtcttactgctggtagtattaaacctgtttctgatcctggggctggtccttctttatggggcagttatggtgatcgccgccatactggtaactctttttgcaaaggcttacacagctaccgcagttatggcaacggtcagttaccggatcgaatggatgatcctgtttttaggctctgtgatggcagttgtgacggattttggagccatgacagttttgtatcatcagtttggtttcacagtgccagttcctgcaaaggaatatgattttccaaaaaacagggaaggctattccagaaagcgctggtttttgacgttaacagctgtattttcaggaattgccgctttcatggtttttgatatggtgtataatggaaattcgccggatcaggcgatcttgtcccaggtggaaatcacagcccacaggggaagctccaaacacgcaccggaaaataccatggcagccattgaagaagcaatcggtgaaatggcagattacagcgagatcgatgtgcagctgtctaaagacggcgtgccggtggtctgtcatgatctgaacctgtcccgtgtggcaggtgtagatgtgtctcttaaaaaccttacctttgatgagttagagcagttagatgtgggaagccatttcagttcccggtttgaaggagagaagatcccttctttagaagaagtcttagaagcctgcaaaggtcgtatccgcttaaatatcgaattaaaaagcataggcaccaaaagcccgcttcctgaggtagtaacagaaatgataaaagaaatgggaatggaagatcagtgtgtgatcacctctgtttccctggattatctgaaacgggtgaaggaagcagagccggagttaaaaacaggttatatcctggcagcagcctatggttcttattataaaaatgaatttgtggattttatcagcatccggtccagccttgtgacaaagaagcagatccaggcggctcatgaatatggtaaagcgatccacgtatggacggtaaacagccgctctgaaattgaacagatggccctgatgggcgtagacaatattatcaccgattatcctacaagggcaaaagaagtgctgtaccagccggatgtagcgaaaaatttactgacatatatcaggcaggtgatgaaataggaggaagatacagtgagagcagtactgcagagagtgactagagcaagtgtcacagtagatggagaagttttgggaaaaattggaaaaggatttatgatccttttaggagtagaaaattcagatacagaagagatcaccgacaaaatggcagacaagatctgtaagctgcgtatttttgaagatgaaaatggaaagaccaatttaagtctggcagacgtaggaggagaactgttggtcatcagccagtttaccttatatgcggactgcaaaaagggcaaccgcccaagtttcgtaaaagccggcgctccggatatggcagagcacttatatgaacattttatggagcggtgcagaaattacgtggatgtagtggaaaaaggacagtttggcgcagatatgaaagtagaactgttaaatgacggcccgtttacactgatgttggaaagtgaacagctttttaaatagaaaaagcggacagcagaaaggacagccatggaactggtattgtattacagtacgggagatgcccgtatgaagaaacaggaaatgatgatgaaaagcgttctggtgcgcatgggggtgaagatccgtaatgtagccccggatcaggtactggaaagtgtgggatatctggcaggtgtgcccggatttgaaaagcgggaagtatcagaaacgctggaaacagaagaaaaactgcctgagatcacagaaccgatgctggtgatgcgtgactttacaggccgcaggatcgacacccttcttttaaacctgagaaaggcaaaggtgccgaagatcaatttaaaagccattgttacagagcagaatgcaggctggagcttttatcatctctatgaggaaattggggaagagcacaggctgatgaatggaggcgcacagtaatggaaaatcccaccaggcagaggcaattagaagaactggaccaggtggagttatgtacccgcattttatatcaggccagaaatgagctgtatgtaaatatgcatttcctggatgtgtctttaagcagtcttggatttgaagcagactggaacagaaatggaatggcctgcgacggtgcggtgatctattatggtcccggatttcttttaggtctttacaaaaagggcagggcagtggtaaaccgttattatctgcacactttgtttcattgtctgttctgtcatctgtatacaagaaagggcagagagaaaaaaatgtgggatctggcctgtgatattgccatggagtctgtgttggacggtatgtatgaaaaatgcatccatgttctccagagtcctttgcgcagagaaatgtatcttcgtctgcgccgctttcttacgggaaataagaataccggcgcttccaatgaggaagagcggaaggtagttcttacagcagagcgggtatatcatgcattaatggagatggaacttcccaaacggcgtatggagcagttggaagcagagtttcatgtagatgaccatgatctctgggagcaggaaccggatccgtcagcagctatgacccggcagaaccagtggaacgataacagggagcggatgcagacccagatggagactatgggggctgaggaagagtcagaaaatgaacagagcttattagactccattcaggtggaaaatgaagaacggtatgattaccggcagtttttaaagaaatttgctgttttaagggaagaaatgcagacagatccagactcctttgaccaggcattttacacctacggtctttcgctgtatggaaatatgcccctgatcgagcctttggagaccagggaagtgcagaggatccagcagtttgtcattgtcattgacaccagtatgtcctgttccggggaactggtacagcggtttttagaggaaacctatgatgtactttcccagtcagaaacctatttccggaaggtacagatccatgtgatccagtgtgatgataaggtgcagtcagatgtgatccttacctgtgctgatgatctgaaagcctatatggagcattttcagatcaaaggatacgggggaacggatttcagaccggcttttgagtatgtcaatactctgaaggttacaggacagttaaatggattaaaggggcttatttattttacagacggaaaaggcatttatccggtggcagcgcccacttatgatgtggcctttgtgtttattaaggagaggttttcagaagaagattttcccgcctgggccatgcgggtggtgttggatgaagaaacgtttaatgagcgcaggcagtagagtgcgtcagcacggggttcgtgagtataaagaaaggaacagatccagtgaatatcaaacgagcaaaagaagaaataaaagataccattgcggcctatcttttaaaagatgaatttggagaatataagatcccggcgatccgccagagaccggtactgctcatcggccctccaggagtaggaaagacccagatcatggagcagatcgccagggagtgtgagatcggactggtggcttataccattacccatcatacacggcaaagtgcagtaggtcttccctttatcgagcataaaatatatggtggaaaagagtattctgttacagaatataccatgagcgagatcattgcttctgtgtatgaccgcatccgggagaccggcttaaaagaaggaattctttttattgatgagatcaactgtgtgtcggagacactggcgcctaccatgctccagtttttacagtgtaagacctttggaagccataaggttcctgaaggctggatcattgtagcagcgggaaacccgccggaatacaacaaatccgtccgggaatttgatgtggtcacattggaccgtattaaaaagatcattattgagccggacttaaatgtgtggaaagaatacgcctatgcacagaatatccacccggctattatgtcctatctgaacatccgtccccagtatttctgtactgtagagactacggtagacggcaagcgttttgccactccaagaggctgggaagatctatcccagctgatccaggtatatgagacactgggaaagaagacagaccgggatgtagtagggcagtatttacagcatcccaagattgcaaaggattttgcaaattatctggaactttattataaatatcaggatcagtaccaggtggaagagatcctttcaggcactatccgggaagaagtctgcgacaagctgcagaaggcaccttttgatgaacgtatggcagtaacaggtcttcttcttgcaaagctgacagacggctttaaggagttaaagcggatgaatgagactatgactcttttaatggcccagttaaagcagtttaagaaggaactggatggtgctgatgttcatgccctggcgcctgctatgatcctggaaagcattggcgctgagttagaaagcatccgcatccacaagaaagaaagtgggctttcagaccgcaggcaggatcacatttaccggaaagtaaaagaactcttagaacagtatgtacagcagatgaaggcccggtccttacaggaaaaggaggacagctggaactggctgcggcagcagtttatggagaaaagcgatgcctatgaggataaaaagacggtctgcggggaacggctggaacatgcctttgattttatggaggcagcctttgcaaatggccaggaactggtgatctttgtaaccggtttaaatacaggggaagccagtgtggaatttttaaaggaatacaactgtgaacgctactatcgttacaacaaagaactcctgtttgataaccaggaaaatgaaatgaaagaagtgctgggaaaatgatgatgcaaaaagagaaaacagtggggaaagcaaaaactgtggggactcttttttccggaaatgatctgaaaaagctgatctttccgttgatcattgaacagatactggcggtttccgttggtatggtagacactatgatggtatccagcgcaggagaagctgctacctccggtgtttctttagtagacattatcaatgtgcttattatcaatatttttgctgctgtggcaaccggcggtgcggtagttgcttcccagtatctgggacagaagcgaaaagatagggcctgccagtcagcagaccagctgatccttgtaacaggtgtggttgctctggtgatcatgactttaagcatcctgtttcgctggcagatcttaaaccttatttataagggcgttacagaagaggtaatgaaaaatgcagtgatctatctgaccatctctgccatttcctatcccttcctggctgtgtataactcctgtgcggcgctgtttcggtctatgggaaactctaagatatccatgcaggcatccattatcatgaatgtgatcaatgtgatcggagatgctctgtttatctttggctttcactggagcgtggcaggtgcggcaggtgcatccctgatctcccgtatgacagcatgttttatcctgatgtggagactgcgggatcctaagctggatatccgtattggaaccaccaaaggcgtgaatatgcgcatggtaaagcagatcttacatatcggtatcccaaatggaattgaaaacagtatcttccagctgggccgtgtgcttacagtcagcattatcgccatgtttggaactacacagatcgctgcaaatgccattgcaaataacctggacagtatgggcgttcttccgggaacggctatgtctctggcgatcattacagtaattggacgctgtgtcggtgccggggattttgaacaggcagaatattatgcgaagaaaatgatgaagctgacttatgtcattaacggaatctgctgtctggtggtgatccttaccatgcctgttactttgcggttgtatggagtttcaggggaaacaagacatttaggagctgttctggccctgatccataatggctgtgctatctttttatggccggcaggtttctgccttccaaatgtaatgcgtgcggctaatgatgtaaaatttccgatgtgtgtatccattgcatctatgtttattttccgtattggtttaagctatgtaacaggtgtggctatgggtctgggagcgatcggtgtgtggatcgccatgatcatagactggatcgttcgcatcagcttttttgttacacggtttttcagtggaaagtggaaaacattttatcatggggaataaaagggggataaaagaaaaaatatgaattccaagacaaaaggtattttatgtattgtgacagcggcattttgttttgcttttatgtcgctgtgcgtccggctggcgggagatctgccatctatgcagaagatattgttccgtaatcttttagctctggtcattgttggggtgggactgatccgtaaaccggagaagatcgaagtgcataaagaggatattaaatatctgttccttcgctcgttctgcggcaccatcggtattgtctgcaatttttatgccattgaccatctggtactttccgatgccaatatgctaaataagctgtcaccgttctttgccattatcttttcctattttcttttaaaagaaaagctgaccctgtttcagggcgtagcggtagtagtggcttttatcggtgctttgtttatcatcaagcctacaggaaatatggcaaattccgctgcttttgtcggtatgatgggcggcgcaggagcaggtgctgcgtatacctatgtgcgcctgttaggaaaaagaggggtcaatggaaaattggtgatcatgtgcttttctgctttttcctgtcttacagcggctgtatttctcatcgggcattttgcgcctatggcatggtggcagatcgtagcgatgatcggggccggatttggcggagcaggaggacagatctttgttaccaaagcttactattatgctccggcaaaagaactttctgtgtttgattattcccagatcctcttttccgcccttatgggatttgtggtcctgggacagaaaccggatctgtacagtatcctgggatatgtgatcatctgctctacagcgatcgttatgtttttatataataaaaaacggggataagattaaacaatgaagataacttatattcaccacagcagtttcttggtagaaacagaggaaaattactttttatttgactattttgaagggaagctgcctcagttaaaagaagataagcccctgctggtatttgccagccaccgtcacggggatcatttttcaccggtgatctttgatctggtaaaaacacatgccagcaccggttttgtgctttccgatgatatctggaagcggagagttccggaagaactgatgggaaaaacttactttataggaccggaggaagaactggatctgcaggctccttttacaggaccgtcaggtgtgaaggtccatggttttaaatccacagatgaaggcgtggcatttctcattgaaacagagggaaagcggatctaccatgcaggtgatctgaacaactgggtatgggaaggagagccggaagcagataataagcggatgagccagcgcttccaccaggaacttgaaaaattaagaggaattcatattgatgtggcctttatgctccttgatccaagacaggagaaagatttttatctgggaatggatgactttatgagaatggtcggtgcagatgtagtattccctatgcatttctggggtgattttgaagtcacagaccgtttcaaggtgctggaatgtgcaaaggactataaagaccgcattgtaaaaataagtacaacaggcgaaagttttgagatttgaaagagaggataaagatatgctgctgatcaaaaacggacgggtgatcgacccggcaggaaagagcgaaagaaacgctgatattgttgttaaagatggaaaaattgaaaaaatatattcagaaggaatattaccagcagaggcagaagcagctgcagaccaggtgatcgatgcaaaaggtcttgtggtagcaccgggactggtagatgtccatgtccatttccgtgatccgggactgacctacaaagaggatatccacacaggagcagcagctgctgcaaaaggcggttttactaccgttgtgtgtatggcaaatacaaagccaatcgtagataacgaagaaactctgcgctatgttctggaagaaggaaagaaaacagggatccatgttctcagctgcgcagcgatctccaaaggatttgaaggaaaagaaagaacggacatggaaggcctgttaaaggcaggagccgcaggatttacagatgacggtatcccgttaatggacggaccttttgtaaaagaggcaatggaagaggcagcgagactggatactgttttaagcttccatgaggaagataagacttttatcaagcagaacggcatcaaccatggtaaggtgtctgaccagctgggaatttacggttctccggcgctggcagaggactccctggtagcaagagactgtatgatcgcactggctaccggcgcaaagatcgatatccagcatatcagttccggtcattctgtggaaatggtccgtctggcaaagaagatgggggctcatgtatgggctgaggtaacccctcatcactttacattgacagaagatgcagtgttagaacatggcactctggctaagatgaacccgcctctgcgtacagagtgggaccgtcagatgctcattgaaggcttaaaagacggtaccattgatatgatcgctactgaccatgctcctcacagcaaagaagaaaaagaaaagcctcttaccgaagctccaagcggcatcaccggcctggaaacttcccttgcccttggcatcaccagcctggtaaaaccgggacatttaagtttaacagaattaatggaaaaaatgagccttaatccggcaaccctttacaagttagactgcggccgtatggaagaaggcgcaccagctgattttgttatctttgatgaaaatgaaaagtgggtggtagacagctttgcgtccaaggcaacgaacagtccgtttttaggggctgagctgacaggcagagtgagatatacgatctgcgatggcaaggttgtgtatacactgtaatgccctgcacacccagcgccgtcaggcgctgcacgtaacttatatctgcgaaaaaaggtccgccgacatctgtcggccggaccttttttaaattccctctttacaaaaacactttagtgtgctaccatgatagcgtgtcaaaacgatagcacattaacgaacaaaccgcctgcgtcagcaggcagtagagcacgtaagtgcggggttcgtgagtgcgggttcgtaagagcagagttcgtgaatttaatgttctctcagaggacattttatataagaggaggaaaattattatgaagaagagagtattatgtgcagcacttgcatctatgatggcattatccatgacagcctgctcatcaggcagcactgctactacagcagctgagacaaaggcttctgaggcagagacaacaacagaagcagcttcttctgaagcagaagaaacaacagctgcagccgcaggaacagaaggcggtacactgatcgttggttttgaccaggatttcccaccaatgggatttttaggagacaataatgaatacacaggtttcgacctggaactggcacaggaagttgcaaagcgtctgggtctggaatatcaggcgcagccaattgcatgggatgcaaaagatatggaactggagtctggaaacattgactgtatctggaatggatttactatgacaggccgtgaagatgattatacctggaccgagccatatatggaaaacacccaggtatttgtagtaagaaatgactccggtattgaaggaaaagatggtcttgcaggaaaagtagtagagtgccaggcagactcttccgcagaagcagcattaaaagaagacccggatctgacagctacctttggacagcttttaactactgctgattacaacactgcatttatggatctgcagcagggttctgtagatgccattgccatggacgtgatcgtagcaggttatcagatccagcagagaaaggcagactttaagatcttagacgactccctttccgcagaagagtatggtgtaggctttaagaaaggcaataccgaattaagagataaagttcaggcagctctggaagatatggcaaaagacggaactttaaaagagatctctgaaaagtggttcggagaagacgttactaccattggtaagtaataagttttaggtctgaaacagatataatgaatttttaggggagtgcagttgacaactgcgcccccttgttctatgataaagactctaccatacgtccgcactatgcggacataaaagaaacacgtaagaaacattttgaaagcaggtacagatatgggtaaaatgacgatccagcagatccttatgcagctggcaggaggtatgggaaccagtatacagatttttgcagtgacccttattttttcactgcccttaggcctttttgtagccctgggccgtatgtcaaaaaataaactccttcaggctgtgatcaaggtatatatttccatcatgcgaggtactccgctgatgctgcagctgctggtagtttattttggaccttactatattttcggtatgcgtgtaggcaacagctatcgcctctgggctgtatttatcggatttgtgatcaactacgcagcttattttgcagagatctaccgcagtggtatccagtctatgcctgtaggtcagtatgaggcagcaaagctgttaggatacagcaagtcccagacatttatcaagatcatccttcctcaggtgatcaaaaggatccttccttctgtaaccaatgaggtgatcacactggtaaaggatacttccctggcatttactttaagtgttatggaaatgttcacaacagcaaaagcactggcttcttcccaggtaagcatgatgccttttgttgcagccggtattttctattatgtatttaacctggtagtagccatgttccttgaatggctggagaaaaaactggattattaccgttagtgtgtactaaaaactggaggattgtggataatgaaattattagagatcaatcatgtggaaaagtcctttgatgacctgaatgttcttaaggatatatcattaagtgtggaagatggagagatcatttccatcatcggcccttccggttccggaaaatccactctgctgcgttgcgctaccatgttggagactatggatagcggagagatcgtttatctgggtaaaaaagcggtatggagcgatgaaaacggaaagttaaactatgcagacaagaaagatttaaaagagatccagagccagtatggcctggtattccagaactttaacctgtttccccatttttctgtattaaagaacattacagatgccccgatccatgtacagaaaagggacaaagaggaagtttacaaagaagcaagggaacttctgaaaaaaatgggtctggaagataaagaaaatgcctatccctgccagttatccggcggacagtgccagcgagtagccattgcaagagctctggcgttaaaaccaaagatcctgttctttgatgagcccacatctgctctggatccggagctgacgggagaagtattaaaggttatcaagtccctggcagatctgcacatagccatggtcatcgtaacccatgaaatggcctttgcaagagatatttcccaccgcgtcatctttatggcaggtggtgtgatcgtagaagaaggagcaccggaaaaggtatttgcttctgacaatgaaagaaccagaagtttcctgggaagatatggaaatctgctgtaggaaatgagatcttaactttaatattgcattataacttaaaataagttaaagtacgaaaaaagagttataaaagagacaattatatagattattttaataagctgccggtgactgtaaagcaatagtcatctggcagctaaaattattttatataaagatttttgattttatcacttccccttccggatctccaacgggaagttcgcattatcagaagtaacataagtaacgatcacagagtctccgctgtcactggtaagcgcgttttcatcggaaggacagttatctttaataaatccgatctctctgccatcacttgtctggatcatgaaggtgctcatggcgttgctggtggtgatgccttcgtcagtggaaatggtccattcttcctgttccgggaaagcgacgatataagctgctttttcaggatcgccggaggcgtctttcatacaggcaatggcaatctggatattcttttcaatctctgtttccacatcgcggatatcagaaagagcgatggtatattcatttccgtcatcggccagtaaggtaaaggcagagccgtctttttctgcttttgtaaccgttccctggagcatatagaattttgtgctttctgtatcttccgggacctgtgtttcggatggagtttcgtctggtttggtggtttcctctgcggaagcctcagtctggctttcggtctgtgtgggcgctgttgtatcagcaggcgcatctggttttttgccgcaggcggacatcataatcgtaccggctgcaaggagtattacaaggtcatacacatgtctttttttcataatgatgattcctcttttctataaagatctataaatatctgtaagctcagtaaatggagtaatattcaggttaattccatggtaacattcccgcccccaaaattcaattaagattcctttaagtttattttttgctctgttcataaaaacagcaaagctttctaaaaaaagagcaaagaagaaaaataagcaaagatgttatattggatacaacaaaggaacatgaaaaatgttcaaataacgaaaataactgaaaacaagatcaaaccaaggataaaacgaagaaaaacaggaggaaatggcatgggggctattcagttgaaaaatgtaacaaagaagtttggtgaccagatggtcattgatgatttgaacttaagcatagaagacggcagctttactgttctggtaggaccgtccggctgtggaaaatccacaacactgcgtatgatcacaggacttgatgaaccgacttccggagatatttacattgacggaaagaagatcaacgacttaacaccaggaaaaagagacattgccatggttttccagaactatgctctgtatccgaccatgacagtccgtgaaaatatcgaatttggtctggaaaacaagaaagtgccaaaagaagagagaaagaaaagagtccaggagatctgcgaggtagtaggcctaactcagtacctggaccgtaaaccggctacactttccggtggccagagacagagagttgcacttgcaagagccatggtaaagcagccaaaagtattcttaatggacgagccgctgtcaaacctggatgcaaagctgcgtggacagatgcgtgtggagctgatcggtttacataaaaaactgggaaccactttcgtatatgtaacccatgatcaggtagaagcaatgtctatggcagatgatattgtactgatgaaagatggctacattgtacagcagtccagcccaagagaactgtataacaatccaaactgcgtatatgcagcacagtttataggcactcctcagatgaacattgtaaaagacattctgccggaaggaatgcaggttggtttccgtccggagaaagtatacttaaaagaagtagaagaagagcatgtagagataagtgctaagatcgctaccaaggaaatgcttggttctgagatcatctactccttagacagtccggcaggaaagctgatggcaaaatctgattatgaagcagaagacgaaagcaccttaaaactgtctattcctgtaaagaacatgtatctgtttgataaggatggaaagcggatcaccttagatgacgaacgcagactgatgatccatgctggatttgcaaaacttgcaggccgggaggtgtaagcagtggataagaaaaaacgaagcgtcagcgaaaagcgggaccgcatgctgggatttgttaccgctatgccggcaatgatcttactgtttgtcttcactgtatatccggtattttacctgatctattattccatgttttccggaagcctgatctccgcgaagaaaaccttcgtgggactggacaactacaaagaactgtttggttcagaaacattccggatggtacttgtaaataccgttgtttatacagtactgttcgtcagtctgaccatggtgctggcagtgatcattgcagtatggttaaacggctccaaacataagaaattaaacaacatggtagagggctttatctttacccctcatgttatttccatggtttccgtatccatcgtattcttatggctgatggacccggataccggatttttaaacatggtcatcacaaagctgggatttgcaaaattcccatttctttccagcccatccacttccatgttttcactggttctggtaatggtatggaaaagcgttggttactatgtactgctgatcatggcagcccttcagacggttccttctaatatttacgaggcagcagaactggattccactccaaagtggagagtgtttttcaagatcactcttccaatgatctcaccgaccatcctgtttacctctgttgtggcatccattgcatctttcaagatctttgactccgttaacgttatgacacagggcggaccggtagactctaccaatacactggtttactacatttattcctttgctttccgctacggaaaaccgggtatggcctgtgcggcaggtgtgatcttactgatcctggtatgcatcatgacctacgttcagttcggtgtaggaaagaaacgtgtacattatcagtaaaatttccacagtttacgatataattaaggaggaaaaatcatggaagaaagcaggggcgcacttctttttcagaaagtatgccatatcctgaacattattttaaaagtggctgttatggtcatcatagcattcccattttactggatggtcagcacgtcattaaaggactataccgaggcgctgcagttcccgcctaccctattcccatccagtcttcactgggaaaactacgctcatgtatttgagatcgttcccattggattatattttagaaactctgttgtagtcagcctttgtgtgctggttctccagtatctgatcattgtaccggctgcttacagctttgcaagacatgaatatttcggaaaaaatatcttttttggaattgtactgttaggattaatgatcccgcagcagatcaccttccttccggtttacctgatgttcagccggatgaagatgttaaaaacatttataccgttaatattaccatttatttccaatccatttggtattttcatgctccgccagtattttatgcagatccctcaggaagtcattgaggctgcaagactggacgatgcagataaccgtaagatcatgttcaaggtaatgatgcctatggcaaaaccggctctgatcaccatcggccttctgtccttcatctctacctggaacaactacttctggccgttgatcatgacctccagtgagacacttcgtacactgcctgtaggtatcgcagcccttaaatcttctgagactttacagatgtggcacattatcatggcaggaaacgtagttttagtactgccgatcctgatcgtatacatgctggcaagccagaagatccgtaattcctttgtatattccggtattaagtaaattataaataaaaagtatattaaacaaacacaggaggaaagaaaatgaaaagaaaagtagcaggagtattggcagcagctatggcagctggtatgttagctggatgcggcagttccgcaaaaccggctgatactacagcagcaaaggcagaggacaccaaggcagcagagggaagcacagaagcagctgcagcagataacggtgacaagatcactatcgagttctggcactgcatgggttcttccaacggagaactgatccagcagatcacagactcctttaacgagtcccaggacaagatctttgtaaaagcagtacatcagggttcttacacagacgcaggtactaagatgcaggccgctttagcagctggcgaagctcctgttttagctcagatggagattggtatgttaggaattttcgctgacgcagatcagttagttgaccttcagaagttcgtagatgaagagaactacgatatgagcgatttcatgccaggtctgttagacgcttcctactatgatggagcattagtagcccttcctcattcccgcagcgttccggtactgtactacaacaaggatcgtttcaaagaagcaggtctggaagaagctcctgtaacctgggatgacttaaaggcagacgctaaggctcttactggaaacggttcttatggatattcctgcccactggatcagtggtattacatgtcactggttatgaacgcaggcggaaccattttcaatgagacagaagacggcatcggatttgcaggcgatcctggaacaaagccactgtatctgtggaaagaaatgatcgcagacggaaccatgcatgttccatccggtcaggattacaactcttctgaggcttgcagaaatgcatttgcaggcggcacagcagctatgatccagcagagcagtgctcagttaaagggattagagaagacctgtgaatttgaagttggtgtaggtgcagttcctcaggataccacactttcctatcctgcaggtggttctaacctgttaatgttcaagggccacagcgaagaagaagagaaggctggctgggagttcttaaagtacatgaccaacaccgaaaatgcagtacgctgggcaaatggtaccggatatcttcctaccagacagagctgcatagactctgaagaatacaagaagatggtagaagaagatccaaatcttcagatcatcgtagatcaggtacagtacagcacctataagacaccatttatcccacagtatcaggaagcaaaagaaatcttcgcaaacgagatccagaagtgcatcctggaagacaactacaccccagagcaggcagtttccagcatggaagagcgtgtagctaaattattcaaataagtaagtcgcgcagtcaaaaacaaggggctgcgaagcagacatacacccggcagatccaacaggtttgccgggtgttttgtatactggggaatttataatatgagaaaaattccagtcaagtaaaaaatttgtaaagattgacaaaaattaaacttttaccagcaataaaattgtgctataattcaatattaatcagacgaagaggttacatatgaaacaaaagaaagtacagtccctttccagaaaattatttgtaaattttatcctcagctgtctccttccaattgtagtggtcagctttctggtgtcctatctgtttggaacttaccagtatcaggagatacgcagccgggcggagaataatacgaaactgatctcggcatacatgacaaaatatcttaacgatattgataacctgacaaaagcaccttattatcattccttttttcagtccaggacgccttttgaggacctgacaccctatgaccagaacaaggtaggagaagaaattggaaaacttttacagctgactacctattccagagaagattttggggatatgttagtcatgtcagacggaaatgtgctgtattttaacacgtctgactggtatcagtatcttccaaccatccaccctcttacaggccgcagctggtatcagtcggctcttgacaaaaacggccgggtggctattatcccggaaaaagatatgacaggggcagatgaagaagaagaactggatacaggaagtttttacatatccagaaaattaaacaacatgttccttcaggatcaggaaaatgtgatcatgctgaacttaaaaacagatgattttgaaaatctgttctccagccttaccagcaaggcgcctctgatcattgcgtttacaaatgacgaagatcagctgatctattccaataagcctcttacaaagactcagactgcagctttaaagcagcagaaagtaaactatgaccacagaaactggctgtgtttttcacagaccttagagcattatcctctaacggtccatgtactgctgtctgcgtcctatgtgatagaccgtatggccattttcctgtttatggcagcagcctgctgtctgttatgctccatcctgggatatgccatgtttaagaaaaataattactggatcgagcgccctacctatcatattaaggcagtccttggagaactccaggtgggcaacttaaattcacggtgtgagccattggtgatccgtgagtttaatgagatcggaacttctattaatgccatggcaaagcagctccaggagaccatccgcaatgaatatgagctgaagctggcccagaaaaacctgcagttacaggcgctccagtcccagatccagcctcattttatcatcaataccatttacagctttattaccttaaaccagatcggggagcaggaggctttaaatgatgctttttactcctttgcccatctgctgcggtatgtgttaagccgcagccgggagactactttaggggcagaactggactttttaaatgattactgttccctgtgcctgctgcgttttggaaaccggctttcctatgagatcaactgttcggaagagtttaagtccctttccatgccaaagctgttattgcagcctctggtggaaaatgcagtgatccatggcatagagcccagcgaagttccatgtaaattgtttgtagaggcagaacgtcacggaaacagtctgtacattcttattgaggatgatggtgtgggatttaaagaggaagaattaaactccccggagtccattggaataaaaaatgtagaaaacaggatcagcctgtggggacctgatatccggctttatatttaccgtatagatggacgaaccattcaggtactgatcgttcctttcaaggaggaaaaacatgaagatactggtgatcgacgatgaaccgctgatccatatttccatagaaaaactgatccaggcatgttccaaagaagacgaggtccttcatgcctataatggccatgagatgttaaaaatgctggaagaacatgagatcgccatggcatatgtagatattaagatgccggggccttccggactggaagccataaaactggggaaggaaatatctccggatacccgttattatatcatgaccggcttcaatgaatttgagtatgccaagcaggcggtaaagctgaaagtggaagattatctgatgaagcctttggataaaaagacgatccaggagaccattacggcggtacgcctgcagcagtatctggcaggagagcggagaaaaaatctgttccgtacctggctggaaagtgctttgaatggaagaaatatcggactgggggaatataagggttatttctgcgggctgctgatgatcacagtggatggagaaaacctggtttccgatccgatcccggctctgtttcagggatatgaggatcatgtagtttctgtattcagtgataacagtttgaaacttctctgtttttcggaaaaaggagaagggatacaggagatctacaggactttatctgcccggacatttgcagaaggaatgacctgttttggcacctctgttacaagggacatggaaaacctgagggaagaccttggaaatctggaagaactcagttgcctgcgggtaataaaaggaaccgggcgtttttattatctcagtcctcttttagatgaagaggaagaaaaagtggagttcggccgcagatgcttaaagtggcaggaggcatggaagagcggagattacaacagcttttccagtttatcttcctggatcgggaaaaagatggaggaaaaggaatggatcgggcggtcaagaaaaaatattgccagttttttcagtctggtcttaaaaactccggtttcagaaaacatggatcaaaaagaactgaaaaacttcctggagcagaaatccagaagccttttaagcagtccttctgaggactccaggatcaattccatgatccgttttattgaggaacattaccgggaagatatttcagcggcagatctttccgagcggttcggtctgtctgccagttatatcagcagtcttttaaaaacagcgctgggcgtgcgctacagtgattacgtggctgggcttcgcttaaaccatgcaaaagagcttctggcaaccacccatatgacggtaaaggatattaccgtagaatgtggctggtacagtcagagttattttacaaagctgtttatagaaagagaaggctgtacgccggtggaatacaggaaatcatttggaaaatgagcacagatgcctgaaaaatgagcaaaaccaggtggatatggatgggctatactggtattaagagagaagaaaagatcagcatataaaagctacacagtataagagacaggatcaggagggacatgaagatggtagcagaaatgataacaaaaatagggataccgtcagatgcggagttatttttgcgagtgatcgtagccagcgtattggggtatatgatcggctatgagcgaaagaacagggataaaagcgccggtatgaggacacatgccattgtagcgttgggggcggcgcttatgatggtagtatccaagtatggtttttacgatgtagaaaaggtagattcctcccgtgtggcggcacagatcgtatccggtgtaggtttcctgggtgcaggtgtgatctttgtccgcaataatacagtcagcggtctgactacagcagcgggactgtggaccacagctggcgtgggaatggcagtgggagcaggaaagtatggtattggtgtctgcgccggtatactggtagtagcgatccaggagatccttcacagaacctctttccttacggcagaacccatacggggttttcttaagatgacctgtacggattatgaaaatgtgatcgcggatatccagatgcatttttcagaagaaaaggtcaagatttcaaatctgaaggtgggaaaaggcaagaatggtacaaagatagaactggaagtagtatatccgcctttatatgataagaatgcaatgctgttaaaactggcagcggatgaacggatcaccggcatcagcggataactgacggagaaatagcttataaatagtctgcaaatggggaatttcctgtaaaaagaccttgcaaaatgcagtgtttccctgtacaatctgatattgagcgaagaatgtatttttcaggtcatcctgtaagtacataagacagaaaagaggggacagcaaatgccccctcttttagcggaaacaaaaacaacagatttatttataagaaaggtaaatgacatgataagtgcaaataatatttcccttcgtgtaggcaagaaagcattgtttgaagatgtaaatatcaagtttacagaaggcaactgttatggactgatcggtgcaaacggcgccggaaagtctacatttttaaagatcctttccggacagttagagccaaccagcggtgaggttgccatcactccgggacagagactttccttcttacagcaggaccatttcaaatatgatgagtacaccgttctggatactgttatcatgggaaatgcaagactgtaccagatcatgaaggaaaaggaagccatctacatgaaggaagacttcacagatgaagatggtatcaaggcagcagaactggaaggtgagttcgctaccatgaacggctgggaagctgagtctgacgcagagaacctgttaaatggtcttggcattggtactgaattccactatgcacagatgagcactctgttaggtgcacagaaggtcaaagttttactggcacaggcactgtttggaaatcctgacatcctgcttcttgacgagcctaccaaccacctggatctggatgccatcgcatggttagaggagttcctgatcaactttgagaataccgttatcgtagtatcccatgaccgttatttcttaaataaagtctgcacacagatcgctgatatcgactacggcaagatccagctgtacgctggtaactacgacttctgggttgagtccagccagctgatcatcaagcagatgaaggaagcaaaccgtaagaaggaagagaagatcaaggaattacaggaatttatccagcgtttctctgcaaatgcttctaagtccaagcaggctacttcccgtaagagagccttagagaagatccagttagatgacatcaagccatccagcagaaagtatccatatatcgacttccgtccggcccgtgagatcggaaatgaagttcttactgtagaacacttaagcaagactattgatggtgagaagatcttagacgatatctcctttatccttggaagagaggacaaagttgctttagttggaccaaacgagcgtgcaaagactgtattattcaagatccttgcaggtgaaatggagccagatgaaggaagctacaagtggggacttacaaccacccagtcttacttcccgaaggataactccgctgagtttgcaaatgatgacaccattgttgagtggctgacccagtattctcctgagaaggacgtaacttatgtacgtggtttcttaggacgtatgctgtttgcaggcgaagacggtgttaagaaggttaaggtattatccggtggtgagaaagtacgttgtatgttatccaagctgatgatctccggcgcaaatgtactgatgttagatgagccgactgaccacctggatatggagtctattgacgcattaaaccgtggtatgatcaagttcccaggcgtgatgatcttctcatcccgtgaccaccagatcgtacagaccactgctaaccgtattatggagatcatcaacggcaagctgatcgataagatcactacctacgatgagtatctggaaagcgatgaaatggcacgtaagagatttaccttcactgtaactgaaagtgatgaagaggatgactaatcattcggataaaaaataggatcaaaagcggtcgcccctttggggcggtcgtagtataaagaacgataagagtaaggagggcaggaaccgggaagtgctgggacctgcctttctgccatttctaggggtgttttccccgcagcgcggggaaggtacacagcagcggaaaataagcgaaaaagagagaaaagaggaaataaccatggaaaagatcgcaagttttaccatcgaccatattaaattacagccgggagtttacgtatccagaaaagacaaagtaggagacagcaccgttaccacctttgatctgcgtatgacttccccaaacgaagaacctgttatgaacaccgcagaaatgcacaccatcgagcatctgggtgctacctttttaagaaaccacaaggattttggagacaagacagtatactttggaccgatgggctgcagaaccggtttttatctgcttttagcaggtgattatgagtcaaaagacattctgccattagtagtagaaatgtatgaatttgtccgtgactttgaaggggaagtaccaggcgcatctccaaaagactgcggcaattacctggatatgaacctgggaatggcaaaatatctggctgcaaagtatctgaaggtgctgacccatattgatgagttcccggagtccagactggtttatccagaataagggagagtattttgcctcgcttcgcggggcagtggagtgcaacagttttcccgctttatgcggggatgtgttatcagcacaactgctttccccgccataaggcgggggcgttgccatacagcaaaaggagaaacaattatgaaaaaactcatatcctggaatgtaaacggtctgcgtgcctgcgtgggaaaaggctttatggactttttcaatgaggtagatgcagatgtattctgtatacaggaaagtaagctgcaggaaggccagatcgatctggatctgccgggctatcaccagtactggaactatgctgagaaaaaaggctattccggcacagccatgttcacaaaagaagagcctatctctgtttcctatggccttggcattgaggaacatgaccatgaaggcagagtcatcacagctgaattcccagagtattacattgtcacctgctatactccaaactccaaagatggtcttgccagactggattaccgtatgacctgggaagatgcatttttagcatatcttaaaaagctggaagagaaaaagccggtgatcttctgcggcgatttaaacgtagcccacaaagagatcgacctgaaaaatccaaagactaaccggaagaatgcgggcttcactgatgaagaaagaggcaagttcacggaccttttaaatgacggttttattgatacctggcgctacttctacccggatacagaagggatttactcctggtggtcctaccgttttaaagcaagagagaagaacgcaggctggcgtattgactatttctgtgtcagcgaaagcttaaaagatgagctggagagcgcaaagatccatacagaagtgtttggttctgaccactgcccagtagaattagtgatcaaaaaatagtataatgaattaacgaacaaaccgcctgcgtaagcaggcagtggagcacgttagtgcgtgtttgtgagtgaactagaacgaacccaaaattcaacaatcaataaagaaatagttaggatcaattacatgaatttacttaccatcgaacatttaacaaaatcctatacagaacgcctgctgttcaacgacactgctttttctatcaacgaaggagaaaaagtgggtctcatcggtatcaacggcacaggaaaatctaccttgttacggatcgctgcaggtctggaggagccggatggcggtacggttgtaaaaggccgcagcctgtatatccgctatctgccccagatcccggaatttacccctggagataccattcttgacagcattgtaagggacaataaaaacgagcctcatttcagctctgtggaagagttaaaggcttctgccaagaccatgttaaaccgtctggagatcgaagattttgacgcgaaagtggagactctttccggcggacagagaaaacgtgtggctcttgcaagcgttcttttaagtacagcagatctgctgatcctggacgagcctaccaaccacctggacagccagatggctgactggctggaaggttatttaaaggcatttaagggcgctcttttaatgatcacccatgaccgttatttcctggacagcgttaccaaccgtattgtagagctggacaagggaaaactgtacagttatcagggcggttatgagaaatatctggaattaaaggcagagcgtttaagcatggcagaggcagcagagcgcaagcgccagtccatcctgcgcacagagatcgcctggatgcagcgtggtgccagagcccgttctaccaagcagaaagcccatatccagaggtatgagcagcttcgtgaccaggaaggtccggagtatgacagaaatgtacagctggagtccattggcagccgtttgggacgtactaccgtagagctgaaggacatctgcaaatcatatggtgataaggtgctgatgaaagatttcacctatatcttcctgaaaaatgaccgtgtaggtatcatcggtcagaacggcagcggaaagtctactttgatgaagatcattgcaggctgggtacagccggactccggtacagtagagatcggccagactgtaaagctgggttatttctcccaggaaaatgaggctatggacgaaagcctgaaggtgatcgactatatccgcaatgcagcagagtacgtaaagacaaaagacggcagcatcagcgccagccagatgttagagcgtttcctgttcccttccagtatgcagtatacaaccattggaaagctgtccggaggtgaaaaacgccgtctgtaccttctgcgtatccttatggaagcaccaaatgtactgatcctggacgagccgaccaatgacctggacatccagacgctgatcttactggaagattatctggatacattccctggtattgtgatcactgtatcccatgaccgttatttcctggaccgtgtggtaaaccgcattttcgcttttgagggaaatggtgtggtgcagcagtatgagggtggttttaccgattatcagcgtgcatggaatgagcgtcatccacagatcagtggaaatggggctggagccggaaatgcaggttctggaaaggcatccgataaagatactgacgaagaaaacgctgcaaatgcaaaggcagtgaacaaaaataactggaaagagacttccggtgcccagaaaaagctgcgtttaagctacaaagagcagagagaatgggagaccattgaaggggatattgcaggtctggaagaggccattgcagccctggaaacagagatcgagaaatctgccagcaattatacccgtctcaatgaactgatgaaagaaaagacagaaaaagaggcacagttagaggaaaaaatggaccgttggatgtatctgacggatctggtggaacagattgaaagccagaaataggccaaaatctgaaaggcagcttctttgcggcaatgccgcgcagcaggatttgggatttgacagtgcaaataaaggaaatgggattgaaaggcggcaatatatgaaaagagagtatagcatagagacaaatgagagaaaaatctatcccctgggagtgacaaagactccggggggatttgatgtagcatttgtttctgagaaaagtccggcattgctgctttttgaaaagggaagcagaaaacggatggccagacttgcatttccggaaaatgcccgtatggggaatgtgcatttcatgacggtaaaaggggattttaccggattggaatacgcttttgaggaagatggaaaagagatctctgatccttttggaacctgttttacaggacgggaaaaatggggagacgagaaggcagcagggcaggcacttcacacaccttttgaagcagtgaaagaagcctttgactgggaagatgacaagcggcctgagatcccagccaatgagtgtattgtatacaagatacacccgagaggtttttcaaaacatgtctcatttaaaggggaaagctggaaaaggggaacctttggggcggtcattgataagatcccctatatgaaagaactgggaattactacagtagaaatgatgccgcctgcagaatttgacgagatcatggaagacgctcccggaaaggtgaattactgggggtactgctgtggacacagctttgcgccaaaagcagcctatgcaggcgcagcgccgggacagaaaaaggatccggtaaaagagtttaagactctggtgaaggcattacataaagaaggtctggagctggtcgttgaattatactttgacgggacacagtctccttcctatgtggtagatgtactccgcttctgggctgcccagtatcatgtagatggtatccatttagtaggttatgcccctttggaaactattgtgaaagacccatatctttctgatctgaaactttgggcgaagaactgggatgaagtgagaactgcgacggaaacagacaggggcaacagaaccaaagaagaaaagaaagagaccggacgccgtttatctgcttacgaaacaggatttatgctggatatgcgcagcttcttaaagggcgatgaaggtatgttaaaccaggtggctcttcatgtaaaggacaatccggatgcagtggcttctattaattacatggcgaataccaacggctttactttaatggatatggtttcttacgatcataagcacaacgaggacaatggcgaggaaaaccatgacggtaccgattacaaccagtcctggaattgtggtgcagaaggtccggtgcgaaagaaaaagatccttgcactgcgcaaacgtcagcttaaaaatgcccttaccatgctttttttaagccagggaaccccgttacttatggcaggtgatgaatttggccgtacccagaagggaaataataatgcttattgtcaggacaatgagatatcctggttaaactggaatttattagactctcacaaggggctttatgagtttacgaaaaatctgatcgcattccgcaaaaagcacagcctgttccaccgcagtacagaacctactttaatggatcataagtcagtaggactgccggatgtgtctttccacggggagaaggcctggtgtccggactttgaacgctacagccgccagctgggggtgttttacagtgcttcttatggggaaaatgcagacggcagcgaggaaccttatttctatactgcttacaacatgcattgggagccacatgcatttgcacttcccaatctgccgtcaggatatatctggcatcaggtccttgatacagctgaagacagtatgaacggctttttgccgtcaggtaaggaaagacatctggatgaccagaaagaggctcttgtccttgcaagatccatccaggtatttgcaggacttaaatgcccggaaaagaaaaaaacacaaagcaaaggtccgaaagcgaaccggaaagaaggaatgtaatatgttaagtgaagctatggagcgttttatcaaggaacatgaaaaagaggcatatgacctgcttcttaccattgcgaaaatcccttccccatctaatcatgaggaaaaaagagcccagttttgctgtaactggttaaaggaacagggggcagagggcgtctatattgatgaggcattaaatgtagtttatccagctgctttaagggataatgtggatgtttatatggcccatacagacgtagtttttccagatgagacggaacttcctttaaaggtggaaaatggacgtatctgctgtccaggagtaggtgatgatactgcctgccttgtatgtgttcttctggcagcaaaatatactgctcttatgataaaagaaggcaaacttaaccagatccggccagaaacagaacctggactgatctttgtatgcaattcaggagaagaaggtcttggaaacctgaaaggcgttaaaaagatctgcgaagattacggcagccgtatgaacactttttgcaccttcgacggcagtctggagcatctggtagatgaagcagtgggatctaaccgttataaagtgacggtacgcacccagggcggtcattcctttggcaatttcggccgtgataatgccattgaaaagctggcaggtatcattgaaaaactgtaccggatccaggttccggagggcggaaagactacttacaatgtaggcactatttccggcggcacttctgttaataccattgcccaggaagcttccatgttatatgagttccgctctgacagaaaagtaaatctggcttatatgaaagaaaaatttgaggcagcagtagatgaggcaaaggcagccggtcttgatattacttatgagatcctgggcatccgtccatgctccggtgatgtagataaagaacgtcaggcacgccttcttgaacgtgcaaaagcagcggtagagacagtgactggaatctgccctggagttggttctggttctacagactgcaatatcccgctttctatgggaatcccaagcgtatgtgtgggctgctatagtggagccggcgctcatacaagagaggaatatgtagaagaagcttcccttcctttaggatacagagttgcttttgagatgatattcggaggcaggtcataagcctgttttttcctgcataaagataaaagagaaatacatatacattcagatgaggatgctgtaaaggccagacgggtcagggcatcctcatttttttctatatgaagtctatacagagtctataggaggcaggaatggcacaatggtatggtctgacccaggaagaagttttaaagcgccttggcaccaacaggaccgggctaaatgagaaagaggcagaaagaaggctggaaacatatggggaaaatgttttaaaagaacaggaagaaatgccctggtggcaggtatttttaggacagtttaaagatcttctggtcatgatcctcattggggctgcgggggtatccatggttaccggagatccggaaagcgctcttgtgatcttttccgtccttttgttaaatgccattttagggactgtggaacatcagaaagcacgaaaatccctggaaagcttaaagcgacttgcttctccggaaacacttctgatccgggaaggacgcgtttgtacggcgccatcttccagggtggttccaggggatatcctggttttggaaacaggaggaatggtacctgcagacggccggatccttcagtcctgcagccttacctgcaacgaaagttctcttacaggagaagctttaaatgtggaaaaaagagagggaaaactgccggcaggaaaaacgcctttatctccgggagatcagagcaatatggtcttttccggtgctctgatcactggcggaaggggaactgcggtagtgacggaaacaggaatggatacccagatcgggaccattgcttccctgatgaaccgcacagtggaaaagaaaacacctttgcaggccagtttagaccggttttccggccatctggccttaggaattatggggatctgcggggcgatctttctgatcagcctgtatcgcagggagcctgtattagatgccctgatgtttgcggtagcgctggcggttgcagccatcccggaggctcttggctccattgtgaccattgtccaggcaatgggaacccagaaaatggcaaaagagcatgcagtcataaaggacctgaaagcagtggaaagtttaggctgtgtatctgtgatctgttctgataaaacagggacactgacccaaaacagtctgcgggcagaggctgtttgcataaatgggaaggtcatggatacagggcagttaaaaaaatattcccaccacccggatctttctcttttcctgcgatcagtcattcttgcaaataatgcttccggagaggagatcggggaaaaagaagatcccttagagcaggctcttttacatatggcagaagaagcaggaaaagatcccggacttcttcgcaggcagtggcgtcgtatttcggagatcccttttaactctgataaaaaatatatgggtgccatatgcagcaaagggggagaaaagatcctttttgtaaaaggggcggtagacgttttgctgtctaaatgcagtctggcagtcaatccctcttttcaggaagaagagactgcttcctggggacgtcccttttccttttctgataaagagcggatccttcgccagaacggtctatggtccaaaaagggaatgcgggttctggcactggcatgtaaaccattaaaagaggaagaaatcagggatgcaaaggcggaaaatatgatctttctgggtctggctgctatgacagatccaccaaggccggagtctaaaatggcagtggcagatgctaaaaaagcagggatccgcacggtcatgatcaccggggatcataaagagactgcggcagcgatcgcctcggagattggtatttttacagctggtgatctggctgttacaggagcagatctggatcagatgagcgatcagcagctgcaggaaagactggaaaagatctccgtatatgccagggtgtctccggaacataagatccgcattgtggaagcatggcagaaaaaagggcacattacagctatgacaggagacggggtaaatgacgctcctgccttaaaaaaggcggacatagggatcgctatgggaaaagcaggcacagaagtttcaagggatgccgctgccatgatcttaacagatgacaattttgctacgattatcaaggcagtggcaaatggaagaaatgtatatcggaatattaaaaattccatccagtttttgttgtccggaaatatggcagggatcctttgtgtactgtatacatctatcaaggcgcttccattgccttttgcgccggtgcatctgctgtttatcaacctgctgacagactcccttcctgccattgccataggtatggaaccggcagaccgggatcttttaaaccagcctcccagagacccaaaagaagggatcctttcttttccatttgcagggaagatcttattccagggttttcttattggtgcagcaaccatgtgggcatgggaaatgggatattcccagggcggggaagccattgccagtactatggcattttccactctgactctggcaagactgttccatggttttaactgcaggggaagaaaaagcctgctttcattgggaataggaagcaatctctggtgtgttatggcattgtttgtaggtgtagtccttatgtgtgcagtgctttttgtgcctaagcttcaggatgtatttgccgcaggggatctgacgggctcacagttactggcagtggttttaggtgcgctggcaccaacggcagttattcagatctacaaaatgatgagcgcaggaaccgcttaaatgacgtctgaattgttcgctaaattttctaagattatgtaaaacatttgtggcaaggtggaaaatatccgaaaaatgtgataaagtaagcattaagaaattgctaaatgaaataaggaggctgttatgaggcttgttacatatgaagtggaacataaaggcggtctgggcgtgatcagcagagacggaaaatgggtctatcctcttcgctccctggatatggattataagaccatgcaggaactgatcgaggggatcagcgagtcagaaaaacagctgcttgaatatgtgtccggtcaggacccttataagatcagaggagcggcacctattgaagaagtaaagtttctggcgccgatcccaaatccgaaacaggatgtgatctgcctgggtatcaactatatggctcacgcagaggagtctgcccgctacaagaaagaggcatttggaggcgaacgtccctatgccgtttacttctccaaacgtgtaaacgaggcagtggcaaacggtgaaggcattgaaagccattcagacattgtaacagatttagactatgaggtagaactggcagtaatcattggaaaagaagcaaaaaatgtaccggaagaagaggtaaaaaattacatttttggttacaccattatcaatgacgtcagtgccagaacccttcagacccagcataaccagtggtattttggaaagagtttagacggatttttcccaatgggaccatgtatcaccacagtggaagatatcccatatccgccaaagctttctatccagtcccgtgtcaacggggaactgagacaggacagcaacacagaactgctgatctttggtattgaccacatcgtcagtgagctttcaaaaggcatgacattaaaacctggaaccatcattgccaccggcacaccggcaggcgcaggaatgggctttacaccgccaaaattcttaaaacctggagatgtagtagaatgtaccattgaagggatcggcacacttaccaatccggtagttgaataaacatgtatgctgcctgacggcggcatcatcataaatgagcaattgtatactatatatttaggacagcaacacaagagacaggcaacataaggaggtatgcatacaatggaatttgtcccaatgactatcaagaagcagaaaaatatcgccctgatcgcccatgatcagaaaaagcatgaattaatggaatggtgcaaggaacataaatccattctggagaaacatttcttatgcggaaccggaacaactgcaagaatgatcaccgattataccggacttccggtaaagggatataacagcggcccattgggaggcgaccagcagatcggcgccaagatcgtagaaggacagatcgatttcgtgatcttcttctccgacccattgacagcacagcctcatgatccggatgtaaaggcactgctgcgtattgcacaggtttacgatattcccattgcaaacaataaggcaagtgcagattttatgatctcatcacctcttatggatgaagaatatgagcatgatgtgatcaatttcagacagaatatttcagaacgggcgaaacagctataatagaaacaacattgtttttgctaaaagggggcacgcagatggaacagaaattatatgatattatggactgggcggggattgaggaactgacctattcagagtcagccgatcctcacagaatgttaggaccacatgcaacagaagaaggcttattgatacaggcatttatacctaccgcaacagcgatcactgtaaagcttacaggaaatgggaaaaaataccctatggagttggcagatgaagcaggattttatgctgtactgatcccaagaaaaacagtgacagattataccttacttgtcacttatgataatggaaccgaagaagagatccacgatccctattctttcggaccacagtttacagaagatgaattaaagaaattcggtgcaggtatctactacgacatttatgagaaaatgggtgctcatccaatgaccattgacggagtagaaggcgtttattttgcagtatgggctccatgtgccatgcgtgtcagtgtagtaggtgactttaacttatgggacggcagacgccaccagatgcgcaaagtaggcgaaggagatgccagcgtatttgagctgttcattccgggcctgaaagcaggatgcctttataaatatgagatcaagaccagagctggactgcctatgatgaaggcagacccatatggaaattatgcagagctgcgtccaaataatgcttccattgtatgggatatcaacaattaccagtggaaagataaaaaatggatggacaagcgggctgcttctgatacaaaggacaagcctttcaatatttatgaagtccatttaggttcctggatgcgaaaagagattgccaaggacgaaaacggggaagatatcattggctccgagttctacaattacagggaactggctgtaaagctggctgagtatgtaaaagatatgggctatacccatgtagaactgctgccgatcatggaacatcctttagatgcttcctggggatatcaggtaactggttattatgctcctaccagccgctatggaacaccggatgatttcatgtacttcatggactatatgcatgaacagggcattggtgtgatcttagactgggtaccggcccatttcccgagagatgctttcggaatggcatgctttgacggaacctgcgtctatgaacatgcagacccaagaaagggcgctcatccgcactggggtacactgatctataactacggccgtccgggagtatctaacttcctcattgccaacgcactgttctgggctgagaagtaccacgcagacggcatccgtatggacgcggtggcttccatgctgtatctggattacggtaaaaatgacggtgaatgggtggcaaatatctacggcggaaatgaaaatctggaagctgtagagttcttaaagcacttaaatactgtattcaagggcagaaagaacggtgcggtgctgatcgcagaggagtctactgcatggccaatgatcaccggtgatccaaaagacggcggacttggttttgattataagtggaatatgggctggatgaacgatttcaccaactacatgcgctgtgatccatatttccgtaaaaataactatggcgagttgacgttttccatgctttatgcctacagtgaaaactttgtcctggtattctcccatgacgaagtcgttcacggaaaaggctctatgatgggtaagatgccgggagagactttagaggcaaaggctgaaaacctgcgggctgcctatggctttatgatgtcccatccaggcaagaagctgttatttatgggacaggactatggccagatcgatgagtggaacgaaaatgcgtccctggaatgggatctgttaaaatatccgctgcataagaacatgcagacctacgtccgtgagttaaacaagctgtatcaggcccatccggcactgtatgagcaggactttgatacggaaggctttgagtggatcaactgcagctaccatgaggaaagcatgatcatattcctgcgcagaggcaaagaagaaactctgctctgtgtatgtaactttgataatatggatcatgagaaattccgcctgggcgtaccatttgcaggaaaatataaagagatcttcaacagtgatgcaaaagaatttggcggcgaaggccgtaccaacagccgtgtgaaagcatccaagaagatagaatgggatgaaagagagaactccattgagatccatatcccgccaatgagctttatggtattctcctgtacaccagaggagaagaaggaaagcccgaagagactgaccacaaagaaggaaagcccgaagagactgaccacaaagaaggcagagccgaagaagctggcaacaaagaaggaagaaccgaagaagctgactacggagaaaaaagaagagccgaaaaagttagctacaaagaaaacagaactcaaaaaactgacggcagagaagaaagaagagccaaaaaagcttgcgaccgccaagacggaaactcacaaactggagaccacgaaggaagagccaaagaagttagcaactgccaagacagaagctcacaagctggaaacaaaaaaagaagagccgaaaaagctggcaactgcaaaagaagaaccaaagaaactggaaacagcaaagcctgaaccagtaccagttttagcacctgcagatccgattgcagagccagtaacaactcctgcttcagcagttacaaaaccagagccagctccatctccagcacccgcagccccggctccaacctcagctgcagcaaaaaaagcagcactcagagcagccaaaaaaagaggccgtaataaaaaacgctaaaaagctacaaaagacataaagaaactgacataagaattacaacaggaggttatcatgcgtccttctctgagaaagctatggatgacgatctccataaaaagaaaaataggaatttttgcagccatggtcattttgatcatggctctttccgcttcttttaatgtgtggatcaccaacgtatccctgggaagctttggaggaattttgaatgacaactcccgctgcaatgactttcaggaggcactggatcaggaaatcagagcttttgagcattatgtgcgaaatgcagaccaggaaagccgggatacttacagggtggcatgtgtaagaacagaacgttgcctgtggtcactgccttctgagtacagaaggattggaaaagagcgcagtgccaggacatggaacataagaaatgcctatgaaggttacaaagtttatcgtgatgacgtagcggaaggaaataaaacaggcagtgaatttgtagacgaactgtattacgtatacaaaatgcaggagtacctccagggatataccggccgtctggtgcagataaccatggcagaaggaacagaagagtatcagaaagaagcagcaatgttttctaatattccgtatattattgtggccatttccatcgcacttatgatcatagcgatctggctgacaaaaattctttcaaattccgttgcaaaacccattgtatctttggctgcaagtaccagaaagatagctgccaatgactttgatgagccggacctgatcatagaaaataaagatgaaatgggagaactggtcacagctttcaatgtaatgaaacacagtaccaagggctatattgccaccatgaaagaaaataacaaaatgcaggagctgctccacaaagaggaattagagcgcagtgaaatggaaaaacagttaggaagcgcaaggctggaactgttaaaaagccagatcaatccccattttctctttaataccctgaatatgatcgcatgtaccgcaaaactggaagatgctgtggatacggaaaagatgatcttaagtctgggaaatctgttccgctataacctgaaaacaagggagcagactgtaacattagaccgggagttaaagatcgtaaatgactatatgtatcttcagaaaatgcgttttggaagcaggatcaaataccgtctgagcctggagacggatgcggcagacgtgatcattccgtccctgtccctgcagcctcttgtagaaaatgcggtggttcatggtctttctaaaaaagaaacgggaggtatcctccatatccggatctggaaaaaggaccgtatgctgatcctttcagtggcagataccggccttggtatgagtcaggagcggtgcgaagaagttgctgcagcaatgaaagaacaccgcacggcaaagattgggatcgggcttggaaatatttataagcgtgtccatatgatgtaccaaaagggagatctgcggatctacagccgggaaggaaaaggaacagtgatacaattgatgataccgcagggagaagaaaaacagggggaagaagtatatgtaccgactgctgatcgcagatgatgaaatgatcgagagaaaggttctttttaaaacattaagccagaacctgaaggggcagtgtgagatcttccaggcagaaaacggaagagaagcactggaaatatatgaaaaagaaaagatccagatcgccatactggatattgaaatgccaggtatcaacggaatccaggcagcagagcggataagggagaaggataaaaaatgctgtattatctttcttacagcttttgatgaatttgcctatgccaagaaggcaatcacagtcagggcgttagattatcttttaaaaccctgggatgaaaaagaattgatgctggtactggaagaagccatgcgaatggcgggagaagaaaaagattttcagaaagaaaagacagaagaggtatccgaggaagaaaaacgggacgatccggaagaactggcagaagatgatgcaggtgaaaatctgcgcatgaataaagtaacagagatcatacgggactatatccgtgaaaattacatgtatgatctttctgtacaggatctggctgacaagatgaattattcagagccttatttctgccggcttttcaagcagagttttggacagaattttacagcgtatcttacagaataccgtgtttccatggcgaaaaaaatgttagaagaacctaccgtcaatattaaggatataggaaagtcagtaggatacgaagactctaattattttacaaaagtgtttagaaggatcacagggcagagtccttcagagtatcgaaatactgtgttccgggaaaaataatctccaagccagcgcatggctgaattataacaaaaaattacggtataggtcaaaatcatactaggattatcaaaaatttaccatggtcagaacaagattttacccttataatgaaatcagcataaagaaagcgtaaaaaaacatgaacaatatgtgaaaaacgtattaacaggagggtaaacaaaatgaaaaaaagatggttaagcgcagcactttgcacagctatggtagccggatcactggcaggatgcggattaaaatccccagaaacaactactacagcagcagctactgaggcagctaaggaggaagcgaccacagcagcagaagcaaaagaggaatccaaaggagagtctgcagcagctggggagcctgtaggacctgcagttactctggtaatggcagaggttaatccactggatactatcgttggacagactgatacagcattcaaagagaaagtagaagagctgtccggcggatctatcactgtagacctgcaggcaagtggtgttcttggttctgagaacgacgttctggataccatgcttggtggtggcggaactattgatatgtcccgtatctccgcattcgctctgacaagctacggcgcagagaagtccgtacttctgtctgtaccttatacatttgtaaaccgtgaacatttctggaaatttgcagatagcgaactggctccagagttcttaatggaaccgcatgacaacggactgggcgtaagaggtctgttctacggagaagaaggtttccgtcatttcttcactgttaagccagtaaatggtctggaagacttaaagggaatgaagcttcgtgtttctaacgacccgatcatgaacggtatggtagctggacttggcgcaaacgcaactgttgtttccttcaacgaactgtactccgcactgcagaccggcgttgttgacggtgctgagcagccaatcgcaaactatcagtccaacgcattcccagaagttgctcctaacctgatccttgatggacataccttaggtgctatccaggttatcatcacagatgacgcttgggataaattaactccagagcagcaggatgttctgaccgaagctggaaagtatgcatctgaattcaaccgtaagatctctgaagaagcagagaacaaagttctggatgagttaaaggcaaatggcgtaaacgttgtagaagtagaagataagactccatggcaggaagcttgcaaggacattatcgagtcctctacaaaggataacgcagaactgtatcagcagatccttgatatggcaaaataatctgagtcagccagttaaatagggaaatggtgtattaggcgcaggggagcgcgtctctcctgcgcttttaattaagaaaggggactgaagaatgccttcaatttttgaaaagatcgataagatccgtcctttgtatgatgcggtatataaatttgtattatttatctgcaagcttttgcttgtagttgatatcgctattaccagtatgtccgttgcaggacgttatatctcatttattccagatccggcatggtctgaagaagtagttctttcctgtatggcttatatggctgtgctttccgcagctctggcaatccgccgcggtgctcatatccgtatgaccgctcttgacagctatctgccaaagaagctggttaaatccctggatatccttgctgatgtagctgttttagtactggctgtcatcatgctgactgtaggctggacttatgcttccggtatcggttcaaagggtacttatgtaagtatgcctggagtatcccgtttctggatgtatctgccggttccgttagcaggtgttgcgatgatcattttcgagatcgaagcactgtacaatcatatcagaagcttttatgtaaaggaggagaagtagtatggatgtaaatagcatggcaattcttatattactgggaagcttcttccttatgatcatgctgcgtttcccgattgcgtacgcagtagctctttcttctgtattctgtctgatggcccaggggcttcctctgactaccatctgtcagcagatggtaaaaggtatcagctctttcagcttaatggcagtacctttctttatcacaatgggatgcctgatgggttccggtggtatttctgaaaaactgatcgctctggcaaatgcctgcgtaggctggatgcgaggcggtatggcaatggtaaacatcgttgcatcttatttctttggtggtatttccggttctgcatctgcagatactgcttccttaggatctattctgatccctatgatggttgaccagggatatgacggtgacttctctactgcagttactattacttcttcctgtgagggacttctggttccacctagccacaacatggttatttatgctaccacagcaggtggtatttccgtaggaagcttattccttgcgggttatgttccgggagctcttttagcagcatccctgatggttggttcttacattatttctgtaaagcgcaactatccaaagggcgacaagttcagcatgaagaacctgttaaagcagttaagcgtttccttctgggcattagcagccgttctgatcgtagtgttcggcgttgtaggcggtgtgttcacagctactgagtctgcagcagttgcagttatctacagcttgatcgtcagcgtatttatctacaaaggtcttgactggaaaggtgtttggagagtcctgggcgagtgtgtagatactctttctatcgtactgatcctgatcgcaacctccagtatcttcggttactgccttacaagacttcacgtaccggatctggcagctcaggctattgttggactgactgataacccaatcctgatcgctctgttattaaacctgatccttctggtattaggctgcattatggatatggctccgatcatcctgatcgcaactcctatccttctgccgatcgcaacatctattggtattgacccgatccagtttggtatcatggttgtccttaactgtggtatcggacttctgacacctcctgtaggtgctgtacttttcatcggttctgctgttgcaaagatcccgatggaaaaggttgtaaaagcaacattaccattctatctgtgcatgatcattaccctgctgctgatcaccttcgtaccaggaatcagcttatggcttccaagtgtatttgcacattgatagaatgacagaagtttgataaaagtgtagtacatataaaaataaagggggtgtcgtggacatccccttttatgctataatgtaatgagcacagggaaaaacaagcggctgcgaagcagacatttgtttttttcaagccattaacgaacgaaccgcctgcgtcagcaggcagtagagtgcgaatgcgcggggttcgtgagtgtatacgcacattcaagggggaccaattcatgtaccaataccgttataaaacaaccagaggtgaatactggaaaatgtccatgtatttcatctaccattccatgaccggcatggtaaaccttgtttttacagcagctcttatagctcttacttgtgcaaaatgggagtcttcgggaaccgtattccgcatctgtatggttttaggctgctgcctttttccaatccttcagccgctggctgtctatctcagtgcaggaaaactggcatccggttccggggaggacacagagatccgtctggatgatgttgggatccaggtaaaagtgggaaatacttacgataagatcccgtggagaaaaatggtaaggatcgcaaagctgccggggatggccatcatttttacagatccatcccatggatatttacttacagaccgtgtcatcggagaagataaagcaactttttatgactggctgatgaaaaagcagtctcagatccaggtaaagtcaaaataaaaggaaacgcagcagtcacaagatcaggaggaaacaatgataaaaaagaagatattctgtctgtgggcagctgcgcttattttaagcggctgtgccggggtatttcaaggaaaagaaaaggaaacggaaccggattttgtactgacctatgcggaaaaccaggcggaagattatccgacgacccagggtgcagataagtttgcggagctggtaaaagaaaaaaccgaaggcaaagttgagatactggtcaatgcaggcggaagcctgggagatgaaaaatctgtcattgaacagttgcagtttggtggtattgattttgccagagtatccatttctacggtagcagagtacattcccaagttaaatgtacttcagatgccctatttgtatacaggcgcagatcacatgtggaaagtactggaaggtcctattggagatgatttccttaattcttttgatggttccggtctgattgcgctttcatggtatgatgcaggtgccagaagtttttataattccataaaacccattgaaaaactggaagatataaaaggaatgacgatccgtgttcaggagtcggaattgatgagtgatacagtccgggctttaggagctgttccggttcctatgatctatggggaagtatattccggacttcagactggaaaagtagacggagcagagaataactggccatcctatgagtctgcagggcattacgaagtggcaaaatattttacagtagatgaacacagccgtgtgccggaagttcagatcgcttctacttatacctggaacaaacttccggaagaatacagggagatcatccgggaatgtgcccaggagtcagcatggtatgaaagaagccagtggaaagcgagagagtctatatccagacagcgcgtagaaacaaaaggctgtgtgatcacccagctttcaccggaagaaaaactgcggttccagcaggcagttatgccgttatatgaaaaatactgtgcagaatacgtggatattattgatgagatcgtagcggaaggatggtaaaatacttgcagttcggccatgaactgaatagtatcataaaaataaaagctgacagaaattctttgaaaaataagaagatcggtcagctttttgttgtttattatttgttaatttaacggagcaatggtagcaggtgcttccgctgtagatggttcatgtgctgctgcagtagtagatttcgctgcttctgtggttgctgcagtagtggacttggcagccgcagtggtagatttcgctgctgcggtagtggacttagcagctgcagtggtggacttcgctgctgcggtagtggacttagcagccgcagtagtagacttagcagctgcagtggtggacttggctgcggtagtagatttggcagccgcagtagtggattttgcagctgcagtagtagacttagctgcagatgatgctttcgtctcagcctttgtttgtgctttggtactgctggtgctggaagattttgtctcagaagcctttgtctcggaagacttagtttcagaggctttggtttcgttctcagtttctgttgctgtagttccgttcgtaccattctttccgtctgtcgggaacttgctttcccggtcttcggtatcaattccggactggctgagagagaaggaagcctgatttgggtttcctgccatatcttctacatagacagtaagggaaccttcttccagtttaaaggtgacttccccgttttccttatcgtagctgtcaggaaggatcttggttcctgcatcatcggtagcatagagggagtcataattaatgccggagatactgtcttctattgttatggtaagtgtaccgttttctattacaacactttcttcatcaaaggaaggcggtgtatcgtccagtacagcaatatgttcgatatcctgggcctgcataccgttcaaacttaatacgtagacttccagagtaccattgtttgtcaggactgcatgataaacgcctttttctttctggaattcaattggctgggactccagagtcgttgtcatcttctttaaaggaagaagagagtggaccttaaagcttacatccagcgttttataatcggtagtatcgctgattgtcatttcaattttcggtgtagccgtgacaataaaaaagatcgccagattgactgctaaaaatggaagtatgtaacatagtaaaatatgtccgaaactgctgcctttctttggactgcggctgcgtctctgacttggacgggaagcagcagggcgggtatgttctgaaccacggctgcttcttggtgcgctgtatgatgaatggtgttccattaccatttcctcctttgttaaaaactctctatagcatagcagaaaaacagtttacttacaaggaattattcattgagaaagtcttacgaaagtgacaataaaatacaacttcaaaataatgtccgggtatggtatgatgataccagggtcaaaagcacgtagcaatctggtatcagagaggccaactgaacatgggggaaaagaggtagagcacaatatgataaaagaggcggctgaatttgcagatcgggctcatcagggcgttttcagaaagggaacggagatcccttatattacgcatccgatggaaactgcggccatcgtaacggcatttacagatgaaccggagatgatagctgcggcccttcttcacgatgtaatagaggacgccggggttacaagagaagaactggaagaaaagttcggccccagggtggcatttctggtagacggggaaagcgaagataaatcaaaaagctgggttgaacgtaaaggtgcaaccgtagaacgcttgaaaacggcaaccagggatgaaaagatcctggctcttgcggacaaattaagcaatatccgcagtacagccagagattatcttgttctgggagatgaagtgtggcagcgtttcaaccagaaagacaaagagatgcaaggctggtattacaaaggcgtggcagaggctctgaaagaatttaaaggccacatttattatgaagaatacgtgatgctgtgtgaaagagtatttggttaaaaggagaagagaatgagaaaaatgaaaagcagggttcttgcggtccttatggcagcaggaatgatctttactgcccagggaatgacagtactggcaggaactaccggtattggtgcggcaaagactgcgtcccagaccgggggaccgggagaggtaaagcaggatataggtactgtaaccgtagatgatacacaggagacttccggagaaacaggacagaatacaggttctcaggaaaacgcaggcggaaccgtacagccgtctggacaggatccacttcaggtcaactacagtgtatatttcagaaatcagggctggagcaatccggcagcagataaccaggcactgtcagcctcatcagagtcatgggtcacatctatgaaagctaatctgatcaatattccatcaggagcacagatcggcgtccgttacaaagtaaatttaagcggtaccggctggcttgactggaaagcagacggcgtagaaaacggcggggcatcagcagaaaagccgttggaagccattgccatggaactgaccggttcttcggcagcttcctatgatctgtactataaggtataccagaacggttcctggacagactgggcagtaaatggtgcaacagcaggaaccgaaggagcaggactgagagttgatggcatcaaggcatctattacagcaaaagatgcaggagcgcctgcagagacagcttcttcaacagtagatccgtcaaagcctatgatcgccctgacttttgatgatggtccaagagcctctgttacaaaccgcatcttagacagtttaagccagtatggaggaagagctacattctttatggtaggaaccaatgttccacacaacggggatgtgatccgccgtatggtagcccagggctgtgaggttgcaaatcacaccaatgaccataaatacatatccaaactgagcagtgacggcattgtaagccaggtaagtgctgtaaaccagaaagtcgcagcagtctgcggcgtatcaccggttgtaatgcgtccgccaggcggctatgtagatgcccattcactttctgttcttggttctatgggaatgccggcgatcatgtggtccattgatacaagagactggcagcacagaaatgcacagaggaccatcaataacgttttaagccaggtaaaagatggcgatattattttaatgcatgatatttacgatgctactgcagacgcagccgtagtactgatcccggaactgacagccagaggatatcagttagttacagtcagcgaactggcagcagccagaggcggaatgtcagcaggacataaatacagccagttccgttaataattaaaaatgatccatcaaggagaggggatatttgccagatgtatttgacaaaatcccctcccttttttataataaacctacagctgtttttaacagctccatgaaacattcaggagacattcagatctcccatatcacagccataacaggcttcatgaaatcactaaaaatccattgaaaaccgaaccttgacaattaaatacagaaacaaaaacacagggtcttacgtaaatattgtgaaggagaaggtatgaaagagaaaaacagaacatggggaaaatggtatttgaaggggctggcatttcttgctacaggaatttttaccagtatggccgcaggtcttagcgtcatggcccagacagagctgacttttacagagaaacttacaattgaagaagtcagagaactgtcagaacctgaaaaagattatgaagatgaaaatgggatccgctatgaattaaaacactgggaattacaggaaaaagaaggggaagagattacccgtaccctggaaaaacgggtggaatatcccaaggtggaagctgcagaggaggttcctgaaatcattctggcagatgaaacagatcccggatggatcctgctttccggaaacttatacagaaaaaatgtagagatcacagggaagcagtggaaggaagatttttcagtacctgttacattttattcctatggggcagatgaatatgaattgggagatcttgtgataccggcaggggaagaccagcttcttgaaaaaacagcagaggcaggtgaccggatcttagaagacctgggactttctaaagatgattaccggatcacttctttagtatggaacggagaaccattttcagatgaaaacgggcagatctgcagggaggcgctggcacttggaaaacggcttttacaggattatgaagtgctgtatgaaggggaagtaaaatggaaagagccggattattatgaacttcatgtgatctatcagctggaagaacctgcaaaaatgacagaggaagaaacgaccatggagataaaagaagatcatacggaaaagaatgacagtccggtcaaaagacagggacccttctggtatctggtccgcaccggccttatgatcacagtggcgatcggtatacttgggcttttcataggactgatccttttagtggtcatgaaaaggagatccagaaaagacagatcttaaaaatccccaaaaacacatttaaggaaaaattcataaaaaatacatagtaaaaacacagctttcgtagtaagatgtatcgtgccgcaaaaagttagtccacaggcggcagagagaggagagatttttatgaaaaaacagtatttagcagttgcgtttctggcagttgcactgggaattaccgcttgttcttctaaaaaagcagatacagaatctaccacagcacaggaagtagaaagtacagaagcgacttctgatgaagaagtagaagaagattattactatggctttgtcagcctggtagaagataatgtgatcactgtttctgaagatggaggtaataccgcaaaatttgatatttcagatgcagagataacaggtgcagatgagatcggcgaaggcgatgaagtaaacgtaggttttgccggtgaattaagcagtgatgttacaaaggcaacttcagtagagatcatgacttccgcagctgaggttgcaagggaagaagaggcagatcaggaagatctggtagtagaaggaactattgaaagtgcagatgacagcaccattaccttaaagacagaagaaggaacctatacactgaatgcactgatcgcccagaaggtaacaaaagacggtatcaaagctggcgcagaagcagaagtaacttactacggtgatctggaagatccagatgacgcagcagtagcgacccgcattgtaacagctgatgcaaaagatacagaagaagcaaagaagaaaactttaaccggtacagtagcagaagttgaggcagatcatattgttctggatactgcagatccggaaaataccctgttttcttttgtaggaacagaaggaatgtttgacggtatcagcgttggtgacaaggtaacagtgatctatgatggtacactgaccgataagacggttgcagcacagggcgtagaataatctacaaaaataaaaagaacaacttataaaaacagtatcccgggatcatctagatcaggatggttccggggtactgtttttaatttctcttattattactattattattcaggatcattttctccagttctgcagcagcaatgctgagggactcatactttctttttatcatacagatatttcgcttggggatcggcggttccatatttaaaatgatcagattttccatattttctttttccagaaaatccgttggaacaaaaccgatcccaaggtcagactgtaccataggcaggatctggtcagcagtcgctgcttcgatctccggggcaaaggtaccgccccttctgttaaaatagtcggagtgaaaggcaaaggaacttgtcttttcaccaagaccgatgatgggatattttttgatctgctcgtctgtaagggacgttccggtagaaagggaaaaaacactgctgcacacaggcacttcctggatacttctgagaatacggaaagaaaatccggatataaattcaaaaggttctgttacaatggcaaaatctgccagtcccctttttaacatatccatggcctggggagtggaatgggtcaggatccggatgtggatgcctggataggtgttgcggaattttttcagggtgggaagaaggatacagtggagggcgatctcgctggctgcaatggtaacgataccggactgcaggcttttatccctggcaatctcttgttccccataggaaatatgttcaaaagcaacggaaatatgggcatacagcttttcgccctccggagtaagtgcaataccgtgtctctggcgtacaaataaagtacatcccagctctttttccagttttttcatggtccgggtaatgtttggctgactgttcagcagtgcttccgcagcccctgtaaagcttttgtattttgcaacatagtaaaaggtacggtaataatcgtagctgatgtccattttggttttcccccatatatacacttgtatactcaggttccccgcgctgacgcgctttactgcctgcattcgcaggcggaaccttcgttaatggcttgtgaaaaacaaatgccgcctttggcggcgcttgtttttcatggcgctcattatatcaaaaacacatatctaaattacatttttaatattttacatatatcttgttacggattataatacagccgacgtcaaaaaacaacattcaatattcattcaacaacattaattaaaataaataagaaagaagtggatcacatgaagggcattatttgtattggaagacaatatggaagtggtggccgtgaggtcggtgaaaagctggcaagaaaactgggaattccctgttacgataagctgctgatcaagaaagcggcgctggagtccgggttaagcacagattttatttccaaaacagaagagtcaccgatcaacagtattcagtttttaagtggaaatccttatgcggatattgcaagcattggcaatactttctattcagagagccaggtgacattcaatgcagagaaagaagtgatcgaaaagatcgcaaaacagggtccatgtgtgatcattggtcgctgtgctgcttccatgatcccgaaggagaacagactgtctgtatttatttattcagataaagagagtacagtcaagcgtgttatgaagcgaaaccagatcagtgaaaaagaagcggtccacaggatcaaacatatgaacagaatgagaaaacatttttatgagttttattccgagactgaatggggacagtcagaaagctatgacatgatgttatccagcagtaaacttggaattgatggctgcgtggatgtgatcattgatggcttaaggggaatgggggaaatggaaaatgaataaggatctgacagtaggaaatcctgaaaaggtgctctggcaattttgtctgccgttgtttggaagtattatcttccagcagttatacaacatcgcagacagcctggtagcaggaaaatttatcggtgaaaatgccctggcggcagtaggaaacagttatgagattacattgatcttcattgcctttgcatttggctgcaatatgggatgctctgtagttgtatcaaagctgtttggcgcaaaagattttaagggaatgaaaacagctgtttatacagcctgcattttcagcgcctttgtatgcgtgtgcctgatgctgatcggtatcctgggatccgaagcattgttaaaactgatccgtactccggatgaagtatttgcagactccaaactgtacctggatatttatgcatggggcctgccgttcgtgttctattataatattgcaaccggtattttctctgcactgggagactccaagacaccgttctatttcctggctgcttcctctacttccaatatcgcagtagatatctggtttgtaaaaggatttaacatgggtgttgcaggtgttgcatgggcaaccttcctctgtcagggtatcagctgtatccttgcaatggtagttatcttccgcagacttgcaaagatcgaaggaaaagaaaaagcaccatttttcgataaaaagatcttaatgcagatcgtagtgatcgcagtgccaagtaccttacagcagagttttatctctcttggaaacattgtgatccagagtatcatcaacggatttggagcccctgttatggcaggttactcagcggctgtcaagttaaataacctggtcatcacttctttcaccacacttggaaatggtatttccaactacgcagcacagaacctgggcgcaagaaaaatgccacgtatcaaagaaggcttccgtgccggtgttaaaatggtatggatgttaagtctgcccctgtttttactgtacttcttcggcggaaacattgtcttaaagctctttatggacgagcctacagaactggcaatgcatacaggtatcatttacttaaagatcctttctccgttctactttgtagtttctgcaaagctggtagcagatggtatcttaagaggtgccggactgatgaagaactttatggtagcaacctttacagacctgatccttcgtgttgtacttgcctttgtattctctaagacagcactgggagcaacaggtatctggtgcgcatggccggtaggctggtgtgttgcaacaacattatccattatgttctacagaagaggaccgtggaaaaatgggcagactgcagccgaaagcagtgtagaaatgaatgtagattaaaataaaaacagatcaacttataatattacccctcgtcttatgaaatagacgggggattttttaataaaaaaactttttacaaaaaattagcactcgactcttgacagtgctaacaacaagtgttatagtacgcatagaacaaaaaacaagataacaaacacactgttccggaaaggggagtgggcatatgaatatcaataaatttacacagaaatcaatggaagcagttcagaactgcgaaaagctggcatatgaatatggaaaccagcagatcgaccagccgcatctgctgtacagcctgctgacgttagatgacagcctgatcatgaagctgatcacaaagatgggcattcagggcgacatgtttaaaaacgaggcaaagcaggccatagagaaactgaccaaggtaagcggtggcggacagctgtatatcagcaatgacttaaacaaagtcctgatcaatgcagaagatgaagccaaggccatgggagatgaatatgtttccgtagaacatcttttcctggctctgttaaaacagccttctaaggaaatgaaggacctgtttaagacctatggtattaccagagaaaagttccttcaggcactttccactgtaagaggcaatcagagagtggtaagcgacaacccggaggcaacttacgatacattacagaaatatggttacgatctggtagaacgtgccagagatcagaagctggatccggtcatcggccgtgacagcgagatccgtaacgtagtccgtatcctttcacgaaagaccaaaaataatccggtgctgatcggtgaacctggtgttggtaaaacagccgttgtagaaggtctggcgcagcgaatagtccgtggtgatgttcctgacggcctgaaagataagaagctgtttgccctggatatgggttctctggtagccggtgctaaatatagaggtgaatttgaggaacgtctgaaagctgttctggaagaagtaaagaagagcgaaggacagatcatcctgttcatcgatgagctgcacaccattgtaggcgcaggtaagacagaaggctctatggacgccggaaacatgttaaagcctatgcttgcaagaggcgaacttcactgtatcggtgcaactaccttaaatgagtatcgtcagtacattgaaaaagatgctgctctggaacgtcgtttccagcctgttatggtagcagagcctacagttgaagatactatttccattcttcgtggtttaaaagagcgctacgaagtttaccacggcgtaaagatcgcagactctgcgcttgtaagcgcggcagtgctttccgaccgttatatatccgaccgtttccttccagataaggctattgacctggtagatgaggcatgtgccatgatcaagacagagcttgacagtatgccggcagagctggatgaactgtcacgtaagatcatgcagatggagatcgaggaagcggctcttaagaaagagacggacagactgagcaaagaacgtctggaagacttacagaaagaactggcagaacttcatgataaatttgctgcaggcaaagcccagtggcagaatgaaaaagccagtgtagataaattatccagtctccgtgaggagattgaagctgtgaaccgccagatccaggatgcacagcagaaatacgacctgaacaaggctgcagagctgcagtacggtaaactgcctcagttacagaaagaactggaagctgaggaagaaaaggttaaaaatgaagacctcagcctggtacatgaaagtgtaaccgaagatgagatcgcccgtatcgtatccaagtggaccggtatcccggttgcgaaactgacagaaagtgagcgcagcaagaccttacatctggatgaagtccttcacaaacgtgtagtaggacaggacgaggcagtagaaaaggttacagatgccattatacgttccaaggccggtatcaaagatcctacaaagccaattggttctttcctgttcttaggacctaccggtgtaggtaaaacagaacttgcaaaggcactggcggagtcactgtttgacgatgagtccaatatggtgcgtattgatatgagtgagtacatggagaaacattcggtggctcgtctgatcggagcgcctccaggctatgttggctatgatgaaggtggtcagctgacagaagcagtacgccgtaaaccatacagtgttgtcctctttgatgaggtagaaaaggcacatccggatgtatttaatgtactgttacaggtactggatgatggccgtatcaccgactcccagggccgtaccgtggactttaagaacaccattatcatccttacttccaacattggttcccagtatctgttagagggaattgatgaaaacggaaatatccgtgaagaagcaagagatgcggttatgggagagttgagagcccacttcagaccggagtttttaaaccgtctggatgaaatgatcctgtttaagcctctgaccaaggacaatatcagccgtatcgtagacctttgcgtagcagatgtgaacaaacgtctggctgacagagagttgaagctgcgtctgacagatgctgccaaggtatttatcacagatcatggctatgatcctgtatatggtgcccgtcctctgaagcgttaccttcagaagaatgtggaaactctggctgcacgtatcatccttgcagatggagtaggagaaggctccgtgatcgtgatcgatgtagatccacagggagatcacctgactgccaaggcagaataatggtttctttattctgatcgatgacccgggtctgctgcaaacagaaatgcttgcagcagacctgtttttttgctttaatacacattattttacctataatataagcattataaagtgaataaagcaagaaaacaggcggattttcaggacctaaatgcacagattacagttgaaatggaaagtaacagatgttataattttttgtaataattatgttaacaagaaaggaaaagatcctatgagtgcaatacccaaagatcctatgattttgttaagctatataaatacccagttaagagataactacagttccttaaaagaattgtgtcaggctatggatctggatgaagaccagatcaaaaagactctgtctgacataggttttgagtatgagcctgaacaaaattgttttcgctaaaaagagccggttttatctgagcaagcatgatcaggtaaagccggtttttgctttttaacttcagaaaggaggaaaaatggctctttacagatacaatgccagagacagggaaaacagaaagtataaaggcgttaaagaagctggaagtgaagcagaactggtaaaagctctgttagaagacggcctgtactgctgttctttgaaaaatgaagaaagaactgcctccatgaagcattttacagttccgttaaagctgcttcctcctttgtgcagccaggtcagttccatgctggcggcaggtgttcctcaggcggagatcttaaaaacagcctgtaaaacagcggcaaacagggaaatgaaggcgcttcttggtgaactggaagaaaaagtccacaaaggacagactctttttgaggcaatggagtccatgcatggctgttttccaaaacttcttgtgtatatggtccagacaggagagaccagtggaaccctggatcatattttagagaaaatgtccagttattatgaaaaagaagtagaaatggcaggaaaggtacggatagcgatgatctatccctgtatccttttctttgcatccataggagcgtccgcctttctgcttacatcggttcttccacagttcagagttatgctggcagaatatgaacttccggctattacccgttttatgatgaaagcaggggcctatcttcaggataactggcttttgtatgtctgtttcctacctttgttgcttttgtttatgatggctctttttgcagttccatggctgcgtctgcgaagagaccagatgatcctttacatccctgtgatctcagggcttatgaagaccatttatacatccaggtttgcttcggcgttctctgttctttatggaagcggaacgggaattttagagtgtatggatataacgggacatgtaatgggaaatacatggatcgaaaagaagctgatagaggctgccgtaggcttgcaaaaaggagagagtctttcccaggcattaagccgtcagagaatctttcatccggtatttctttccatggtggctgcggcagaagagtccggacatctggaagctgttttaaaacaggccgggatctattatgaaaaagcagcagaacagtctgcagtgagaatggtaacactgctggagccatgtatgatcctgatcatggcagcagtggtgggaagtattgttttatccattatgctgccggtattcagtatgtatacagcaatgttataaaggaggatgcgatgaaacattatatttatcttacagaagataaactttattacatccgaaaagaaaatagagccagaggctacagttttatgggttcccgcaccataaccggaccagaaactgtaactggtgccatggaatcactggcagatatttataatctgaaaggaagagcggtcgtcctggctatagaagcctctgtaaagatccattttatgagtcttccggcttcttctaagaaaacggctttgcagatggcggaaaaacagctgctggtcctgggagaggaaggagaacgccttcttgcagctgattttatgccaaataatggtcagggcatgttaaaaggaactgtgtacacagtatcagaagcatggatccgggccattgaaacgggagccctgatcacacgtttccgtatccattccattttgccgggacctgcgctgttggcctcttttctggaaccttccgattatggaatgaataagggaacggtgatctttgtccatcttgcagaccagtccattgttttttaccagatggaaaatggacactgccgtcatctggaacattccagtttaaaaccagggatgtttgcctatctgggagaagaaaaggcgttaatggaagaagtggcggttctgatccgtcgttttcagaccaggatgaaacaggaaagacgggaatttcagatacagggagtcctgatccagtgtgagtgtttgaaagcacccagatcagacgcaggagttcttgcaaaaatgctggggatcccctgtatggctctgggaaaaaatgggatatggaaacggcaggcattagcgggagaactgaaaaatctgctttaccggaatacaggtgaatttatggaaggagaaagcttctatgaaaagataacagaggcaggttttcctttaggtccggtgtgcgccagtctggtagcatttgcagtcatcgttctgagtgccctgggcggtcagttttatacagccggaaagctggaacgtctggaccggatcagtgcagaccaacagggtaatgatgttacacaggaacgaagggatctggaaggaaagatcagtgaactggcaaaactgacagcagaaaaaagagaacttgccggtcagatcacactggatccggcggtattttcctgtctggagcaggcgcttttgccggaaatggacttggaaaccatagaatatcaggcagaggatgccagcatacatctaaaattaagcaccagtaagccggagcaggtttctctgttttgcgaaaaaatagaagaaaattccggattttctttacagcagagtcactggcagcaacaggaagataaagtaagcgctgccctggtctttacaataggaaagggggccaaagatgaggctcagtaagcgggaacgttttttactggcagttctgacgctgttactgttgtggaccggtttttataaattctggatcgagccggaaacagatctgttgtttgccaacttacaggagatcaacaggctggaagaacagatcaaacggggcggtccccagggaaaacagaacctggaacagacggcagaaaaactggaacaagccggaaacggacagatctattttgcagatatgagtccggaaaaaatggacagaaagcttttgcagcttgcaggagaaactgggatacaactttccggagtggaaacaggggaaacaaaagagatggatacagcaggttatgtgtatacacctcttacactggaatttgtgtgtacagacagggaacaggcagccggatttgtggaaaagatcaaccaggaaggcgccggtatgtggataaagtcgttgcagttagaaaaagatgaaactgcgatgaaagggaccatggaggtggtttattgtcatgaccagtgaaaaacaggcaggcttttctcttttagaggtgatcgtaagcacagccatcctcttttctgtagcaggagcctttctttccatgactgctgcaaacggagtccttcttaccagggaacattccctgatgcaaaatgtatacgaactgtctgaactggcagaagaaggacagggagaatggaccggagaagaattagagatcatctttgaaggagaagaggaagacgcaagcgaaatatttggaaaatacattgtgaccagtgaaggaggagactctatgacttattacaaaaggggattccaatgagaaacagagatggatttacattgctggaacttgtagctgctctttcactcagtgcggtcatagggatctgggcagccggctttttcggcagtcagatgcatgaatacaaaaagcagacgcagatccttaagacagaggaattagcagaccgtgtctgttttcagatcacttccagactggatcatgccttccttttccgggtggaccccaaagaaagttctgttttgtattactgcgagggatccggtgaattaggagaacaatgggagcagatatcagaagaagacttaggattgggtgctgagaaagagtatgaggtccggctggatttttctgatacacagtctcaaaaggcagtttctgagataacagtcctttataaaggagagaaagtatactcccggacgatccggctttcttctgtttatggatatttggaggatggagaggatgagaaaggtgaaaacgagaataaagacggatcgctttcatggtgatggccgggaaggcggaagtctgctatatgtgatcttttttattacactgctttctgtatttgcctgtggttttatggcagtgtccagatatcatataaaaatggctctgaaaaaccgggcatacatggaagcgcgcctgaccacccatatgatccataattctttctgcgaagcagtttcaaagggagaaagtgatgcccttaggcttttgtggaaccagtatgaaggagatctggaggatgaggaagcagaagaaaatgaaaacgaagatataccagaaacagaaggtgccggggcagacgggataacgaaactggatgcagatgaaatacaagatacaaatgaaagacaggatgcagacgaaagacaggatacagacctggatttagaagaccgggaatacataacagaaggaaccggaagttataccgatgaaaaaggcgaaccctgcgaagtgcgtatccgcctgaaattagaacctgtggaagaaaaagcctatgtggatacatggacgaaaatatccggtttttccatgcatttagaaggagaagttcctttacaggataccccataggcccagataccaggtaaagatcttttcttcaaaaaagagaaagatcaaaatggacacagtaaagaatggtgccatgggaagtcttgttttcagggaggctttcttaaaaatgagaaggggcagacagaacatacctgccagtatataggcaaaaacaagggagaccgctccggttgtgatcccaagaaagaagccacaggcagtcatcagttttacatcacccataccaataccgccgcggctgataagacggatcccttccaaaagcccgccgcagagaacagcgccctctatacgcaatagaagtccgggacctgaccggatgaacagagaatagaaagacagcaaaaagatcaggatggaaacagagtcagggatataaccttctttcaggtctgtccatgcagcaatgataagaagaaggataaacagaaagaaaattcctgcagccatattgtcacctcctgaaaaatcatctataaaaaagtataacatctggaaaagaaaggagcaaccagaccatgaagatcaccattgaagaaatgctggtggaacgggatattatttccagacagcagctagaacgggtaaaagagatccagaaaagtcatgaagataaaagcctgacagatatgttgcttcttttgggatatacaacagaagatgtgatcatgaactgtttcagcgaccgggatgacatggagatcatccatttagaggaacggaccgcagatccggctgccatagagatgcttccggagtcctttattgtgaacaatgagatcgtacctgtatgttttgaaaaaggggatcttttagttgcctgcgcctttcctgtagatccggatattttagaggaagcggcgacaatctccggtatgacgatccggccggtgctgacacctgcagaccagatccagaagatgctgtcggggatggaaactataacagaagagaagaaaaaagcagctgaaaccggaaagacagcagaaaaagtggaaagcgctcctgcagtccgcctggtcaatacgctgatcgaatctgcatataagagaaatgccagtgatatccacatagagccgggaaaagaatttctgaccatccgttttcgtattgacggagatctgtgtatgtatacaaagatggaaatgtcctatcaccggccggtggttaccaggctgaaacttatgggagaaatggacattgcagaaaaaagacttccccaggatggaaagtaccgctatgaaaaagaagagatggcaacagatctgcgaatttccacccttccttccgtttacggggaaaaagtagtactgcgactgctgggaaatgacagggacagttccctgatagatgtgcgccgtctgggaatggatgaaaagcaggaagaaatatttggcagaatgttaaaagcgccctttggcatcattcttgtaacaggacctacaggaagcggaaaatctaccaccctttatgcagccttaagccagttggcagaaaagaagattaactgtgtaactgttgaagacccggtggaaaagctgataaatggtgttacccaggttcaggtaaatgccaaggcgggacttacttttgcaacggccctccgttctattttaagacaggatccggatgtgatcatggtgggagaaatacgagatgaagaaacagcagatattggcgtaagagccgctgttacaggttatctggtgctgtcaacgctgcatacaaacgactgtgtctctgctgtctaccgtctgcaaaatatggggattcccttttatatgatcgctgctgccaccacaggggtagtggcgcaacgactggtaaaagtgctctgtcctcactgcaggcggaagataaaagccggacagcagacaaaacggctgttgtatgaggtttcaggaaaggaagcagaggaagtctgggaggcagttggctgtgaagagtgtctgaatacaggatacagccacaggcgggcgatctatgaaatgtttgagctgaacgagacaacaaaaaatatgatccgtgatggagaaacagcagaaaagatccgccgctaccagagggaaagaggcttcctttctctccaggaacaggcagcccagatggtaatgaacggtgaaatggatatggaagaagcagagaaagtgatctattctgcagactaaaattccaagagaatgttaagatacaagggaggcaatgtatgaagaacagaaagtggaaagaaaaaagaggatttaccttagtggaactgatctgcgtgatcgcgatcatgggcattttaatggctgtggcagtaccttcttacagctgtatccaggagaaatctgccaaacaggtagctatttccaatgcaagagccaactatatgcagggaaaagcgcagcaggaaatggtagatgccggtgtgcttgcagattcagaaacagaagcttataactatgatgccagtgaagacaaggcaacctgggaaggtgagatcggcaagaagagttacaaagcagaatactccggaaaaacaggtgaaggctacattctctcagatgataacggaactgaccggtaacagcagtccaggtttttgaggaaagcaggaaaaagaaaaatgttgaagagaataaaaaagtcagggggattttccctgatcgaattgctggctgtccttgcgatcctttctattcttatggcagtagcggtcccggccactgcaggttatatcaaaagtgccagaagggcggctgcctatacagagtcccagatcgcggcagacgcagtacagctgtatctgtatgatgaaaaagaagcagggcgcttaacagtaggcaagcttcacaaattaatgaatttaaacttaagtgacccggaaaatgttctggcagattatatttccggtggtcagaaaaactccaggatcgtatctgtggacgcagatctgaaaacaggacagttaaagaaactgatctatgaaaataaatttgtaaaagtcagtcttacagtggatgaagatggcacaagaaatatggaagaagataccatggataaggcagactgaaacacgggcagactattgccatgaaaagacaagctgcttatttatctattttaaaagattttttccgctgcgggatcgccggatggtgcttagagatcctctttacatctgtggaagcgtggatgaggggagatgtgaaaatgatggggactacctctgttatcatgtttcccatttatgcggccggtgccattcttccggatattgtaaaatggtgcgaccgatggttaagcggacttccagattttttaaaagctgacagggaagaaatatcccctgtggctttaaaactgcgccatggactgatctatatggtgcttatctataccggagaatatatagccggttcttttctgatggccaaaggactctgtccctgggattattcccagtggccggatcagatccacggagtcattcgtcttgcatttatccccttctggtttgggaccggcctgctttttgagtcactctgtacccattgatgacttgtatttaggcaggtctttttatataatagtaacagtttaaactgacaaaggagaaaaatatgatacgtttgattttggtggtgttagcagtggtgctgtatctgatcttttcaattccggtgctgtcttatttaaagaacctggaaaaaaaggatccaaaggcagctgcaaagaaaagtcttgacctggtgcggtggattctggggatcgtaagggacctggcagggatcacttatgaggtccggggactggaacatatcccttccgaccgtgcagtactttatgttggaaaccacagaagctattttgacattgtaatgggttacactacagttccggcgcctaccggttttattgccaaaaaagagatgatcggtattccgctgttaagccagtggatggtgcagatgaactgcctgtttttggaccgcagcaatataaaagaaggtctaaaaacgatccttacaggaattgagaaagtaaaaggcggcatttccatgtggatcttcccggaaggaaccagaaataaaagcgaagatcctgcagatctgatggaattccatgagggaagtttaaagatcgcagaaaaaagcggctgcccggttatccccgtagcgatcacaggtacagatgatgtatttgaacgtcatatcccatggatccggaaaagccatgtgatcattgaatacggagagcctatttatttaaaggagcttcctttggataaaaagaaattccccggggcctataccagagagatcatcagtgagatgataaaaaaacagcagcaggaaagagctggaaaataaagaagcaacataagcggtaaaagaaaagacataagcgaggatggaaaattatggaaaatctggatcttcaggaaatacggaaaaaactggatgggatcgacaaccagttagtagaactgtttgaaaaaagaatggcgctctgttccgatgtagctgaatttaaaattcagacaggaaagaaagtctacgatggggagcgggaacggcagaaattagactctgtgatggctatggcagacagcgagtttaataaaaaaggcgtttatgaactgttttcacagattatgaccatcagccgcaaactgcagtatggtcttttagtacgtcatggacaggcccttgagaccggatttaccatggtagatgacctgaaaaaagaaggcgtgcgcattgcctatcagggagtggaaggttcctatggacatggggcggcccttcagtattttggacaggacgcagatgtatatcatgtaaaatccatggaagatgctatggtggaagtagaagagggaagagcggactatgcggtactccctattgaaaattcttccgcaggggcagtcagcgacaattacgatcttctggtaaagcataatgtatacatagtaggagagacagaacttgccgtaaatcacgcccttttaggacttccgggagcaactttagaggacatccgtcaggtatattcccatcctcaggcactgatgcagtgttcccagtatttaaacagccacagacagtggcgccaggtaagtatggaaaacacagctgtttccgcaaagaaggtattagaggatgcagatgtgacccaggcagctgtagccagcgagatcgccggaaagctgtatggtctgaaagtgctccagccatccattaattacaataaaaataatgtgacccgctttatcattctggcaaaagatccggtatactgtaagggagccaacaagatcagtatctgttttgaatgtgcccacaagagcggtactctttacaatatgttaggaaacctgatctacaatggtgttaatatgctgatgatcgaatccagaccgatcccgggaagaagctgggaataccgtttctttgtagatgtggaaggtaccttaagtgatcctgcagtccagaatgctttaaaaggcatttccgaggaagcagctactttaagggttctgggaaattatgaggcacagacagataaataggatatgatccaaaatacagaaagaggacagaaacatgaatatcagtgaacttgtgatctatagaaatttaaaacatgaagatctttttgaggatatggcaggccttatgggactgggaaaagaaggacagaaagcagacccgtttgcctgtgcaggagaactggtggaactggcagtagaatatggttttgagggcaatttatggcactgcttcttagcgctctgccttgcagacaatgaaaatgcctacactaccacctgcgagatccgcggaaatgcgggaggcaccctggatatgctggcaaaaaatgattaccgcatttttaaggcattatttgattatgatctggaaacactggaaccggcagctatgtggaaagaaattgcccactatcgcccatccagacaggagagccgtgtatttaacagacggatccgtgaccgcatcgtagatctggcagtccttttagagcagtcagaagatgaaaatgaattccagagccatatggctgcattttacggcgaatatggtgttggaaaatttggtttaaacaaggcattccgcattatcgaaaaagaagaagaacacaaagtgatcattgatccgatcatcaatgtagagcatatttactttaaagacattgtaggatatgaaatgcagaaaaagaaactgatcgagaatacagaagcctttatcagcggaaaagaagcaaataatgtcctgctctttggagatgcgggaaccggaaaatcttccagcgtaaaagccatcctcaatgaatattatggtcagggactgcgtatgattgaagtgtacaagcatcagtttaaggcactttctgaagtcttagagcagatcaaagaccgtaactacaagtttattatctatatggatgacctttcttttgaagagtatgagctggaatataaatatctgaaagcgatcttagagggcggacttggaaaacgtccgaagaatgtgcttatttatgcaacctccaaccgccgtcatctgatccgtgagaaattctctgacaagagagaattagatgatgatctgcacaacaatgataccgttcaggagaagctgtctttagcagcccgtttcggtgtgaccatctactatggttctccggacaagttccagttccagggcattgtaaaggctctggcagaaaaataccatctggatatgccggaagaagaactgcttttagaggcaaacaagtgggaaatcagccacggcggactgtccggacgtactgcttcccagtttattactcatctgttaggcagaaagtaagaatgggtgtagttatgcgattttacataaaatttacaaagcctttactcccatatgagggtaaggcaggttaaattgaggtagaatactgtatacagatgtataaaatagaactattttcaaattccccgttttggggaattttttaaaagaacattacagttctctcgtaaggaggaaaaaagtggcagttaggatgtttgcagcgatcgatgtaggttcctttgcactggagttagggatctatgagatctcagataaaacagggataagaaatgttgagcatatccgtcatgtgatcgctttgggaagcgataccttcagtgaagggaaaataagttatgacctggtagatgaaatgtgccgggtattggaaaaatttacggaaaccatgaaaatgtaccgggtcaaggactatcgtgcctatgccactactgccatgcgtgaagcgaaaaacagccggatcatcctggaccagatccgggtgcgcacagggctggaagtgcacattatcagcaactcggaacagcgctttatcagctacaaggccgttgcctccaaaggcggtgagtttaaccagatcatccagaagggtacagccatcgtggatgtaggttttggcagtgcacagatctcccttttcgataaagactctctggtggctacccagaacctgcctcttggcagcctgcgtctgcgcagccagttagccaaaatacctgccagtgtggacggccacagacttcatattgaagagatcgtggataacgagctgatcacattccggaaaatgtacttaagagaccgccagatcaccaatctgatcggtatcggtgacaatattttatatcttatgcgccgtctgggtataaaaggcggggaaaacagggtagactcagctgccatgcatgctttttacgataaactctcccagatgaccattgaccagattgaggaaaatttcggtgtaaacagtgaatatgcagcccttcttcttccggcagcaactgtgtatacaaggattttagatataacaggtgcggaaatgttctggatcccggcgatcggcatatgtgatggtattgcagcggaatatgccagcgataaaaagctgatccgctttgaccataactttgaaaatgatattcttgcggcagccagaaacatggcgaaaaaatataagtgtcatgccagccataatcaggtgttggagcagtatgccatgaatatttttgacagcaccaggagatttcacggattaggggacagagaacgtctgctgcttcagatcgcagttacccttcatgcctgcggaaagtttatcagcatgaaaaactccaatgaatgtggctatactctgatcatgtctacagagatcattggtttaagccatttagagcgtgagatcattgccaatgtagtgcgttataacatccgtgatttcgattatgatatgatgcagctggaaacagaagcaggacaggatctggcaggagtatctgaccggacggccattaccattctgatcgcaaagctgacagcaatcctgcgtcttgccaactctatggacaagacccataagtcaaagctgatcgactgccgtatggcagtaagagaaggccagctggtgatcactaccggttataagggtgatctggccttagagagtgcctcttttgaacagaaggcagctttctttgaagaaatatttggaatacgtcctgtgctgaagcagaagaggagagtgtaaaatggctgagaaaaatgattatgtaaaccgcgaactaagctggatcgagtttaactaccgtgtgttaagcgaagcaagagataaaagtacccctttgtttgaccgcctgaaatttttaagcattacagcttctaatctggatgagttttacatggtccgtgtagcttctttaaaagacatggtccatgcgaaatatgccaaaaaagatattgcaggacttactgcaaaagagcagctggacaagatcagtgaaaagactcaccagctggtagatctgcagtattccacctacaaccgctccctggtacctgctttaaagcagaatggtctgcgcattgtcatggaacatgaagaccttaccgaagatgaggctgcttttgcagatgaatatttccacaaaaatgtatatccggtccttacaccaatggcctttgactcatccagaccgtttcctctgatccgcaataaaacattaaacattgccgctcttttgaaaaagaagaatgaaaaagaggcagagctggaatttgccatggtacaggttccatctgttatcccaaggattgtagagctgccggaagaaaaggatgagaacggagaaacccagagagtggtcatcctgttagaggagatcattgagcggaacatgcagtcattattcttaaattatgacattgtggcatcccatcctttccgtatcatgcgaaatgcagatttctcattagatgaagaagaagcagtagaccttctggaagagatccagaagcagttaaagaagcgtcagtggggcgaagccatccgccttgagatcgagtccaatgtggataaacagcttttaaagatcttaaagaaggaactttccatcagctccgaagatatcttccagatatccggaccactggatctgacctttttaatgaaaatgtatggtcttgatgggtttgaccatttaaagactccgaaatacacaccgcagcctgttccggaactgatgaatgaggacaatattttcaccaatatccgcaaaggcgatatcctgctccaccatccataccagagctttgacccggtcgttaattttgtccgcagtgcagcaagagatccggaagtccttgccatcaagcagaccttataccgtgtcagcggaaattcaccgatcattgcggcactggcagaggcagcagacaacggcaagcaggtttctgttctggtagagctgaaagcccgttttgatgaggaaaataatatcaactgggcaaagatgttagagaaagctggctgccatgttatctatggtctggtgggcttaaagacccacagtaagatcactctggttgtccgtatggaagaagacggtatccgccgttatgtccacctgggaaccggaaactacaatgactccactgcaaaactgtatacagactgcggtatcttaacctgcgatccccagatcggtgaagacgcaactgctgtatttaatatgctttccggctattcagagccaagagcatggaacaagctgtcagtagctcctttatggctgcgccatcgtttcctgcgcatgatcaaccgtgagacagagcatgcaagagcaggaagagaagctcacattatggcaaaaatgaactccctttgcgataaggagatcatttccgccctttatgacgcttcctgtgcaggggtaaaaatagagctgatcgtccgtggtatctgctgcctgaaagcaggagttcccggtcttagcgaaaatatttccgtgcgctccatcgtaggaaatttcctggaacacagccgtattttctatttctttaatgacgcaagtccggaagtttatatgggcagtgcagactggatgccaagaaacttggatcgccgtgtggagatcctgttcccggtagaagatgaaaacctgaaagaaaaggtgatccatatcctgaaactggaactggaagacaatgtaaaagcacatcttctccagccggatggaagctacgagaaagtggacaagcgtggaaaggtccttgtaaattcccaggatcagttctgcgaagaagccatcgaaatggcaaaggcctgccaggagtcaaaagacccggcagtgaccaggatcttccagccgatcgaaagcagtaatgaataaaatttaatctgagaagggctgtttacgcagtccttcttttttttgacttttttaattgcaatctgctgtttaggaaagaatttctgcattttaggaaaaagtggttgcaaagaaaaatagttatggtacgataccagtatcttttattttgatcttttttaaatatttcttttctatctggagtcttttttgatcccaaccagtttaaacaaaataaagcaaagctacaaaatgtaaaaggagaatctgtgcctatgtggaaaatagcagttgctgacacggcagaggaccatttaacgcttttaaaagatgccctaaaagcgtatttccaggaaacacacagggtattttctgtgacttcttatacagatcttacatttctggaaaaagacatggctcagggggaacattttgaccttctgatcctggatcttgtgatgaacggccaaaggagcgttgaagcagtccggcggatccgggaaaaagaggatggaacccctcttatatttctcactgcaaacagggaatacgctgtggaaagttatgaaatgaacgcactggattacatgataaaacctttgaaaaaggagcgcctggtgaagcggttagaccagcttttcaaaagaaaaaatcccagattttcagtccgtacacagggagattacagctattacggttatgatgaactggtgtattttgaagccagggagcaccgggtatatggcaggcgaaaagacggaagggagtttaaatgttcccaaaatcttggcaggatcgaagaacagctgagagaagatccacgtttttaccgctgccacagaggctatatcgtaaatctggattacgtagaacagatcagagaagtaatgttgttaaaaggagatctccgtgttccctacaggctcagaaacaaacgaaaaataaaggaagattaccagcggtatgtaacagaaaatatctgttttttaaaggagggaaagggcagtggaaaaagaatgggttagcaagatgggaacttttgtggggacgcttttgtgtatcctgatcctgccggttgtagttataaactgcacactgttgtttaaaagccatataaacagggagcgggtgccgaatattgcaggtactttcccaatggtggtactgacagattccatgtatccggaatttcaggcaggggacctgattttttgccatacaaaatctgcctcggatgtaaggccaggggatgtgatcgcattttttgatcctgcaggaaacggaaaaagcattgtcacccacagagtggagtcaattacaacagatgaaaatggaagtctggcatgggttacaaaaggggatgccaataatgtaaaggacaatgctgtagtgccggcaaaaaatctggccggtgtataccgcaggcggatccagggactgggaaatgcagtggtctttatgcagacgtcaaaaggaatgatggtctgtgttgtgttcccgatccttctgtttgttatgtatgatgcagtccgcagaaaccgatatgaaaaaaacagaatatatgccatggaatgtgaaaggagaaatcaggtatgaagaaaaacaaaaggatgcgtacagcatcaggacttatgatcgcagctcttttaaccaccagtatgatcagcggaacattcgcaaaatacaccacagcagatgcagcccaggacagcgcaagggcagcaaaatggggcgtaaatctggggatcagcggaagtctttatggggatgcttacgcaggagcagactccaacaccattgtctccaatacggacagttccgttacggttaaaagttctgctgccggaaccgatgtgatagcccccggaaccaggaattctaacagtggacttcacattacattaaacggaaccccggaagtaagcaccagagtatacggaaccatcaagacacagaatatttatctgaagaaaggtgaatatggggtgatggtggaagcccatgatgtaaaggcagaggattttgcaaatggggggaatgaatactatacggagacaggtggtgcgtatgaaaaggcgaaggggtatatacagggagttaattattataccctggaaaacgcagccaatgttgatgccaattactatcccgtagtttacagcggtgcaaaagtaactggctcaaagacaaaagacagcctcagtgagatcggacagaatattgctaatctgctggcagactcccagcctgttaccggcagtgcaggaaccggtgcagagcagggacagacgatctatacagtagaaacagatgctgcaaagatctatgcaccgggagaagatctggcagatcaattaaacaatctctccagtaccaatattacctgggagtgggagtttgaaggagatgacggtgcggatacgatcctgggggcgctgatcgcagggacaagtaaggttgtggtgaaggatcaggactcaaattcctacaataaaatttctgtgaatgaaggaactggtctggctgctgcagataataccatacttgcctccgtaaaaaccagcttctccatagaattaactgctgaccaggtagactgattatatgttctgtatagacggatcctgaaactgtatatctggataaaagaaagttatacagctgctgtttgcgaaagatctgccccggctttcaaatggaaaaccctgtttttgccaggtgtattcttctggttcatccttttatttttcagacgcaggatctatgttaccggctttataaaagaagcagcaggcggaactctgaaatggagcggaaaagaagaaaaaattgctgtggatggacgttttgttttggaaaaagttccctttggaaaacagaagtgggaagttcttatgccggatggtaccgcttatcagctggtttggaaactggaacgaaagaaaaaagaacctgtttcatttgttttccgggaaaacagtccgtttaagatccgggtgggaaaacagatccgggcaatagaactggtgctgactttaaaagaaagtacattccttccggacacttcataccgggcggttattgataaaaagcagaaggtatacataccagagggtgtgatcccgccggaagaagacggaagcaaccggacaccggcaggactgaaggtagacaaaaacggaaaatttagcatcgatgaacagagaggcatggataaatgaaaaaatggatccgcaggtttgtaatgacaattctggggctggtattaggcacagggatgtacatgatctgtgcagaacgtgtattaaaagatccctttcccatgccttttggtatcggctttgctaatgttgtttcaggaagtatggaacctgctttaaaaaaaggaactctgcttttagtaagaaaaaaggcagatgcagaaatcggggacattgtagtctaccagtcaggtgagtccataatcgtacacaggatcatttccgcagaaggggatcaggtcattacaaaaggggatgccaatgaaacagaggacattcccattaaacggtctcagatcaaaggtgtggtaatgtttaagatcccggaaattggaaaagggatacagtggctgcagacccttgccagatacagcggtgcagatcataagcaggaaagcgcaaaagtggctgcatttgaacatggggaacagatcctgcagccctttagcagagcagggaaaacaggtgatttgcagccgggaacagacagggtatacgcccttacagtgacaaatgaaaaaaatggaaatgtaagtgagaccagacaaaactattccattcaggttacaacagccggaacgctgccccttacatatgtattaaaaagaaataatactgagctgggacgtttttcagaaatggtcacagaaaattatctgtttcagacggctgatatgtggtttgaagcaggaaaaaaagagggccatgcatatgaactggaagtaatatggccggaagataagaaagatgttttatgggcggatgttccggatcttgtgaaaatacaggttcatatggaacaggcagaaactatagcatcaactcttgtagtacccgttcttgcccggtatcatcacagcagcacccatatttacgaaatggctgcagttcctttttattttaccagtgaccggctgacagaagaaggaaatgaataccagctgtcaccggaaaccgaggcacttgcaatagaacttcgcaatgatcaggacggatacagatggtctgatacgcccatccattacatttatcaggtgagaaaagatggggaagaaaaaggcggagaaggtattttgtatccacagcagggggcaggaagttctgagcgtatcgtaattcaggatatggctccgggagtttatgacatagaggtacagtcgttgtctccttttgaaaaaacattaaagggaacctttgtgataccggaaaaggaaaacgatattttctgtgtaaaagaggaccaacagggcagtttttgtgtacagctgattgtttctgtaaaagattacgaggggaatataaagatttcctggccggagggactgataccggatagtacccaggcggtttttgaggatgtaaagaccaggacggaagatctgtatgaggcaggggagctgactttgtggatgaaaccttatacgtcccggacttatcgcttttttaaaacagatacagagaccgactatacctgggatacgcagctaagagcagaggcagcagattaagatgtacttgggaatatgaaaaagggatatgagactatgaaaagagattatgaaaaagcagaagaagtataaaatatgcagaggattgttttttctggtatttcttatggagattagtggaaggctggctttttggggaatggcagcagaaaaagagtcagcagaaacgcagacaggggcagcaggagcatattatgaagaggatgcttttacagtgcttctggaaacagagtatgcagagaaaaaagtttctttaaaagaagcatttcactggtgtccggaatacttacagggccttagggtaaaagaggtagaactctccccggggctttatttaacagaagaagatcccggggattttacaggagaaagagccaacggacagtttcgggtttgtttagagattaatgacagtggaaaagaactgcttacagaagatggctgtcccggaaactggtggatacaggaagaggaaacggtagatctgaatatgatcctggagttttcaaaagcccttacagacagtgaaagagagcggtacattgatgtgactctgggaaacgaccaggttacccttaaacgcaggatctggctggtctgtaaggtgataccggtcagtttttccggctctggaatactcccaggctcctgttaccagttaagatctgcagagacagagaaaaataaaaaagcagttatagatgaggcttcatcttttacagcattttacaatgtgcgttcttttattcccggaaactatgacagccggaagatcgtctggaaaaaagacgggatggaagaaggattgcctgtggggacttcgatcattatgacagagcggtcagaagagagaagcacaacagatttctggtattacaaggtgcaggagaaagtcagcaggattgacctgaataaatttacccgtatgagtggtgatgaggaatacagttatgatatggaaagtacagagtataactctttggactatcaattcatggcagattttgaagagtcagaagagaaagcagaagaaggtttatatcaactgggtttcatagcatcagacagctcagaagaagtgaaagtttgccagatggaactggaagtgcaggtggtgccgggaaaaacatatgatcttgaaataagagaaagcgaggagagagaggaaacaccaaaagttacagtaacctgcaaaacagaagatccaacggttataataacctgcaaagcagaagatccccgggaagagattgcgcaaaaagaaaaaacgttcgctttggtactgaccggcacaggagagaccgaacttcccgaagatgcccggttaaaagtgggaaaaagagaatacaggaccagcggaaaagacagttttatcctgccgcttggtgatatgcaaaatgaaaattccaactggaaacttactttactttctgacctgtttccggaagaagaaaaagagtaccattttacagcgcagctgtaccagacagatccattcacagaaagcatgcctttaaagggaaaagcagtaacagaaccaagagagcttatttttaaaaaggcagaaaaagtcaggactgccttaaagatcaccggtgtcaggatatcagacagtgagggatggcgaaagggacagtcttttaatgttcaggtattaaatatgcctccggaaggtcagataacagtaactgcctatgaaggcctcacaggctggcagagatccgatgcctggaatgtgtcaatggaagaaggaaagatctcaaatgcatgtgcatcaaaaggaactttccgccttatatttgaaataaaaaatgctgccggagaagttgtctgtttggcaccttattatttgatcgtaaaatgagtaccgcctgaaaatagaacgctatattcagtaaaaagaaagaaaaaaacagggaactgctgcagtcaggggaaatttactgcacagttccttttttgccataatttttcaagaaaaaagtaaggaagtaggcatatgtatatggtataatgaaagggatgaaagggaaaaaacaaccaaagaggaggacaatcaaatgcccgatattaatattcttgttgtagatgatgaaaaagagattgcggacctgatcgagatctatctggtcagtgatggatataaagtatttaaagctgaaaatgcagaggctggtctgagtatcctggataagcaggatatccacttggttctgttagatattatgatgcctggtatgaatggactggagatgtgcagaaagatccgggagacaaacaatattcccattatcatgctcagtgctaaatccacagacttagataagatcttaggacttggtacaggtgcagatgactatgtgacaaagccatttaacccattggaactgacagccagggtaaaatcccagctgcgccgttacactcagttaaatccaaacagcggtgcaagggaaacagtgaacaatgagatcaccattaagggaatgagcattaaccgtgacaatcataaagtgatcgtagacggagaagagatcaaattaacacccattgaatttgacatcctttatctgttagcttccaatcctggaaaggtattcagcaccgatgagatctttgaaaaggtgtggaacgaaaaagtatacgaagccaacaatacagttatggtacatatccgtcgcttaagaggaaaaatgaaggaagataccaggcagaataagatcatcacaactgtgtggggagtaggttataagattgaaaaatgatgtaagcagacgctaccggaccagggtgatcacaaacatcatatacagcgccattattacctgcctggtagaggtgttctttgttacaaacctgtctatggtggcacggtatatgggaaacaagggaaaaatggtcctgatggtccaggcgatcgaaaagcagcatacagcggtggtgcttttgtatctgatcctggggatcctgctgttttccattacatttatgatccttcaggaaccctatatccgctatatcagtaaaatatctgatgcagtgcagaatatatcagaaggaaacttaaatacagtgatcgatgtgatcggggatgacgagttttccggtatggctgccaatttaaacaggatggcagcggatatcaagcagctgatggaaaaagagcgtgagtcggagcggacgaaaaacgagctgatcactaatgtggcccatgatctgcgaacccctcttacttccattatcggttatctggaacttctggcagggaaccgtcagatcccggaagatatgcagcataaatacatagagatcgcatatggaaagtcaagaaggctggagaagctgatcgaggatctgtttggttttaccaagttaaattatggcaagatcgccatgcatgtgggacagcttgatattgtgaagctgttgggacagcttttggaagaggcgtatcctaattttgtggaaaagggtctgtcttatgatctgcagagtaatgtgcctgccaagactattaacgcagacggaaatcttttagccagactgtttgacaatctgatcggaaatgccattaaatacggagcagatggaaagcgggtcctggtgcagatccatgcagaaagcgaaacagtaacagtttctgttaccaactatggatatgtgatcccggcagacgagcttcctcttattttcaataaattttaccgtgtagagcagtcccgctccagcagtacaggaggaactggactgggacttgccattgcaaaggagatcgtggatatgcatggagggaccattagtgtagccagtgatcttaacggaaccgtatttactgtaaaacttcaggttcgttttgatgtaaataaggaaaattttggaaatattgaggacgaaaaacagtaattaaagaggaattacaggatggatacaggcaaaaataaaatggttggaatgagaaaaaaaagggcgctgagaggcaccctttttgcggtcatattgtccgcttccatgagtttttcggctctggctgccatgacagcagacggaccgggaatggggacagcggcaggggcatcagcggatacttccgacagtacggacagtgagcaggtgcttaaaacagaagcagcgccagaggaaggccctatccgtatggatgtggtctatggatatgacaatgtggcaaaaagcgggcgttttcttccactggatatacagttagacaatacgtcagaggaaacctttgaaggaactttgtgcgttacttcccaggaaccggactatgacggttacagcaacaattcccaggaaaaatatgatacataccgctacgaatttccggtcatgatccagggagacagcagccttgaaaagaagttaaatatctctctttgcagcaagtcagacctgatgtacatcacacttatggatggggccggcaatgaggtacttagcaaacggctgaaaatggatctgaacacagatgcagcccagctgtttatcggtgtactttgtgatgagccggaacgcctttcctatctggagcaggtaggtgtcaattacagtatgctgcgtacaaagaccattgacctgtctgtgtatgatctgccggatacagaactgggactggaccagttagatgtgcttctgatcacggattttaactcagagacccttacagaagagcagacagaggcgatctgggaatgggtacaccgtggcggtattttactgtttggaacaggtgccaggggagatgaaacattatctgctttcagtaaacaattgctggaatatccggtttcacctggaatggtttacgagatccagatgggacaggaccgtacagccagggaaccgggggaaaatattctttccctggaaggaacagaagtggatttaaaaggcggaacagacctgcttacaagtggttcccttacggttctttctgctacttctgtaggaaatggaatggcagcggcagcaatttttgattttacggatctggaagaatattgtttaaaagacaactcctatgcagattatttccttacagcactccttggtgaagacagaatcaataccttaaacagcaacgcaggtggtggaaattacaaccagttctggtctgtccagagtctggtaaatacaggaaatattcgcaatcttccaaagatcggattttacatgaccctggcagtggcatatattgccctggcaggtccgggactttatttcttcttaaaacaaagagatctgcgggaatattaccagcctgcagtggcactgatcgccatctgtaccactggtatggtgatcttaatgggaacaggaacccgttttaagggcccgtttttcacttacgctaccatagaaaataccagtcagacagataaaacagagacgacttttatcaatatgcgggctccttataataagacatattcagtggaattaaatccccagtaccgtctgtatcctgttacaggcagtccttattatgaccaaaatccatcgaaggaatttttcggtgaaggagaagcagatatcaccatccgctatggggaagatgccacctggatccaggcagtggatacaggggcctttaattccaaaattttccagatggagcttcacacccagaatgaaacaggagaaggtttctcaggtgagatccgggcttttaacggaacagtttccggtactcttaccaataactattcttatgcagtagagaacgcagcaattcttctttacaatcagctgctgctgatcggaaatatggaaccaggtgagacgatctccttagataaccgtcaggtgactttctgcgcgaccaatttcagctatgcgctggcttcccagatcacaggcgtttccctgtatgacagaaacggggatatggaagatgccacctatgttcaggcattagagcgggccaatctgctttcattttatattgaaaattatctttccggttatcatgcacaggccagtgtggttgcttttggaagaggaaaagaaaatctggatttcctgaagaaaaatgactatgaggcttatggctgtacccttcttacctcagaactggatgtaaattatgaaaagggcggaaatgtatacagatctgccatgcagaaacagccaaatgttctttccggagaatatgacgcggacagaaataccatgtatggaatggcgcctgtgatcttggagtattatctgggaaatgaaacagatgtggaagctttggacttccatccgctgacagcagaggcttctgacagtctgcgttattattacacagttccatttacaggcggcatgtatttttataattacaatacaggggactatgatctgatgaagccggagaaagatcactataccagggaagagctggaagaatatctgtcaccgggaaataccattacagtgaagtatgtatatgataccacaggagaatatacctggaatatcatgcttccggtacttacagtcacaggaaggagcaagtaatgcttaagattgaaaatctgcataaaatatatggcaaatatcatgctttaagtggtctggacatgactgtaaaggaaggcgctctttatggatttgtcggtcccaatggagcgggaaagacgacggcgatcaagatcatgaccgggcttttacaggcagaagagggaagcgtattgatcaacggaaaagatgctctggcagatccggaccagttaaagtcctgtattggatatgtgcctgattttttcggtgtttacgataacctgacagtaggggaatatatgagtttctttgcttcctgttatcagttggacggactggtggcaaggaaacgttacactgcccttttggagcaggtgggtctggaagataagctggatttttatgtggacggtctttccagaggtatgaaacagcggttgtgtctggcaagggcgctgatccacgatccccagatcctgatcttagatgagcctacttccggactggatccccgcacaagagtggagtttaaggagatactggaagacctgaaatttgcgggaaagaccattctcatcagctcccatgtgctctcggaactttctgaaatgtgtacggatatcggtatcattgaccagggaaggatgatcttagagggaaatatccaggacattttatcaagggtcaatgcgtccaatcccctggtgatctctgtttacagcaacatggaaaaagcgttgtctattttaaagagccacccctgtgtgcgcactatttccatgagggaaaaggatatctgtgtccgcttcaccggggatgcccaggatgaggcgatcctgctgcagcagctgatcgacagtgatgtgctggtaaatggctttaccagagagaaaggcagcttggaaacagtctttatgcagctgactgaccatgaagaagaaagggtggtgacgtcttatgaagcagaatccggtctataaccgggaaatgcgggtaagttccagaagcatgaagctgcccctgatcattttcctgtttaatgggatcttgtttttggtgactcttttaaatatgtattctgtgatcatgcaggtaaaggcgtcagccagtatccagtacagcagttttatggaattatatgaatttgttacgtccatggaatttatcctgttaatgtttatcgttcctgcagtgactgcttcagcgatcagcggggaacgggagcggcagaccttagatctgatgctgactacacggatgagtgccggacagatcgtaacaggaaagcttttaagtgccctcagtaccttatttttgctgatcctttccagttttccggcagttgccatggtatttgtatatggaggaattacctggacagatgcgttttctctgatcctatgttatgtaacagtagctttttttgcaggaagtattggcatctgtttttcagcagcttttaagagatctacggtttcaacggttgtaacatatggaacactgaccgctgtggttgcgggaacttactttctgaaccgctttgctctttccgtatcaggaatggatctgcagcggagcgcagcctatgttttaggtgagagcagtgcgaaagcttcttccggtggtttcttttatctgtttttgttaaatccggctgttacatttatggcagtgatcgggggacaggcaggaagaggaacaccgttagcagatattgtaagttattttggaataccggaaaatggatttatcataaagcactggatcggtttcagtatcctgatccagctggcagcgggaatggccctgatcaaccgggcgatccattttgtagagcccataaagcataagaaaaccagtagaaaggggaaaaaataaatgggaattataaaagcggcagcacatgcagtaggaacgggactggcggatcagtggctggaggccttagaacctgacaatatgggggcccagactgtttttacaaagggcgttcagatccgtaaaggaaaaggggaaaatggaaaaggttccgataacatggtaacagaaggttccattatccatgtatacccggatcagttcatgcttttggtagacggcggaaaagtagtggattatacggcagagcctggatattacaaagtaagcctggatacacagccttccctgatgaacggaacgttgggaaaagcagtaaaagagtccctgggaaggatccgttttggcggtattgcccccactgcacagagggtatattatatcaatcttcaggagatccggggactgaagtttggtaccaaaaatgccatcaactattttgacagtttttataatgcagagttgtttttacgggcccatggaacgtattccattaagatcacagatccgctgaaattctatgcagaagtggttccgaaaaatgcagaacgcctggaaatggaagatattaatgagcagtacttaaatgagtttttagaggcactgcagacttccattaaccagatgtcagcagatggtatccgcatttcctatgttccgtccaagagcatggaactgggaaaatatatggcaaatgtactggatgagcagtggaaagaactgcgtggtatggagatccagtctgtgggaattgcaagtatttcctacgatgagacatcccaggaactgatcaacatgcgcaacaaaggcgctatgatgggagatccttccgtaagagaaggttatgtacaaagtaccattgccgaaggtctgaaaggcgccggaaccaattcaaatggtgccatggcaggatatatgggaatgggatttggcatgcagaacagcggtgcgtttatgggagccgcttccgcaaccaatatgcagcagatgcagatgaaccggcagatgcagcagggacagcagatgccatatggaacaggaaatggaggcttccagggcggacagatgggttatggagcagcaaatgcaggcgcccaagcagtccggccggcgcagactgcaaatcagccgtggatctgtcctgcctgccatgtggaaaacacaggaaaattctgcagcgagtgtggaaaaccaaggccttccgtagagtggacctgtccaaactgcggtactgttaataagggcaagttctgcagtgaatgtggaagcccaagaggagaagcctgagtatgggagtgataacctataaatgccccaactgcggcggtgggcttacgtttaatgcagaaaagcagaaatataaatgtgaatactgcctttccgagttttcacaggaagaactggacgagatagagaagcgggagcttgagaaggccagaaagcaggcagaagtccagcgtgatcctgaaccagaaggagcaggatctgaggctgggacagaggaacatgtatcaggctccaaaaagactgttacccccatcatgtacacctgccccagctgtggcgcccagatcgtcacagacgagacaacagcggcttctttctgctactactgtcacaatcccattgtcctggaggaaaagctgcggggtgagtttaagcctgattatgtagttcctttccagatcgataagaaaaaggctcaggaaatatttacccagtgggtgggccggaaaaaatttgtacctgattatttcttttctgccagtcagatcgagagcatgaccggtgtgtattttccttactggttatatagctgccaggtgaaaggtgatctgcaggcagagggaaagacggtcagagtgtgggatatggcgggaatgcgctatacagagacaaaagtttatgatatccgcagacagggagatatgaacgttgactctgtagccagaaatgccttaaaaaaagccaatcgaaagctgatcgacggtgtgctgccttaccgcctgaatgagaaaaaagacttttccatgggttatctttccggatttatggcagaaaacagggatatggaaaaggacagttttgtaaatgaagtgaaagaagaagtaaggcagtttgcattatccagtctcagcagtcagacaggaaattattccagcgttcagatacgaaagaaccaggcggatattacaggagagacctgggcaacggccctgcttcctgtgtggacagtgacttacaatgataaggcaagaggaaagatctactattttgccttaaacggacagacgggaaagatatggggtgaacttccggtggatcagaaaaagctggcagttttatttttaagtatttttatcccggtatgtgtgatattgctgtttttaggatactggatcggctgatgaggtgatgagatgaaaaagataaaagggataatgaccggtctgctgatctgtgtatttctgatcatgggcagtatggcagtgtgggcagatcagacaggagctgtaagcggtcagacgcgggtgtttgaccaggcgggactgttcagtgaaacagaaaagatccagttagaggaagagatcgcccagtgcagaaaaaacacaaaaatggatgtagtcgtagtaagcgcttatgcagacgaccgcacggcggaagaatatgcagatgattattatgattacggcggatttggcgtcggaaagaaagccagcggtgtactgcttctgtactatatggacggaccgggccagtcaggaggagaatgttatatttctacttcagggacaatgatcaccctgcttacagatgagcgcattgaaaccatcttagatgatgtatatggaaatctgggaaacagggattttgcggcagcttcccagatttttctggaagatgtaagtgactatgtgaaacagggagtggagtctggtcagtatacttatgaccgtgataccggggaaatcgtccgttaccgcagtatccgctggtatgaggcagtggcagcggttgtgatcgccggtattctggcaggctctgtgtgtatggacataaaaaaacgctatgccatgaagcagagcagcagggaagcagctaacagccttcaggcatacagggcagactgcgcttttcatttttctgttaccggtgataagctagtcaatcagtttgtccgctccattcctattccaaggaatacttccggtggaagcggcagaggacattcaggaggcagttcatcaggacggagcacagtacatacttccagcagcggacgcagccatggtggcggcggcaggcgtttttagttttcagaaggaaaatttaaaaggactgacacagtttaaaagcatcagcgtataatgatagtaacgcatccgctgatgctttatatagatcttacaggttccggaacctggacggcagggctttttgccctgcctggtacataacccagtgggcaccaggagaggaaagggaccggggtctgtaagatcataagatagtgcatcaggggaaagacatgaattatacctatatactccactgcgcagacggaacattgtactgcggatggaccaatgacttaaaaaaacggctccatgcccacaacagcggcaccggagccaaatacacaaaatccagaaggccggttacactggcctattatgaagcctttgagacaaaacaggaggctatgaagcgggaatacgcaatcaaacagctcccccggaaaaagaaagaggagctgatcagtcatggctgcaatatggatctgtgcatggttgcagaggaccaggtttatgccacaaactgatacatcatcatatagtgacacagactgccgcccatgacaaacaggtgaaagatctcatgggaaccgaaatagcggtgtctggaattaaagataggcagtttcagggcgtagatgatgcctccaactgtgtaaatgataccgcctgcaagtaaccatgcaaagcctcctgacggaagcgctgcaatgatcttggagatcgccaggatgcagatccagcccatagcaatgtagatcagggaagaaaaccatttagggcaggtgatccacagggcattgatgatgattccaacaagggcaatgccccatacaaggcctaaaaggttccagccggtgtgatcgcctaaaacgatcaggcataccggggtataagttccggcaataaggacgaagatcatcatatggtccagtttgcgcagacgcttattgataacaggggaaatattcagtgtatggtacagggtacttgctccatacagacagatcatacttaaaataaacaccgccagtgctgccagatgcaggtagcctggcgtttttgctgccttgatcagaaggggaacagctgcgatggcagcagacaccatagcgatcagatgggtaatggcacttcccgggtctttcatacggcagatatttctttttatttttgcactcatagcagatacctccttgcatgtgtcatataagctttgaaaacttttacatgtagtaatcaaaactatgtatcgttacaattaatactatacaactgctcgaaggattatgcaaggtttttcttttatgtttgttttaactgagaaaagaagtaatcttatctttcggaagtgttttgagtttctcagttaaaagttccagaaatttatggattgtagccgtttttcggttttcatttaccagataatataccacctgctctggaggagaattcttaagttcgtaaatgcaagctccatttttttgaagccgtatggctgtggtataagggcagaaagtccaggatttttctgtcataaaataggctgcaagggctgcatgctctaaaataaccagtggtggtatggtttcatcaaaattttcagaatgccaggatttgaagtctttattccaggcaatgcgataaaattcagcgccctgatctgtaagctgtgcattgcggtatccttttcgcctgataaagagggaatgtccaagctcctgttccattgtctggatatggcgggttaaagcacagcattgggagcttctgcattattcggttttcctacaacctatattcttgcaaatgagatcgccaatagtgtaggagaaaatgacgcagaaaaaaattacttacgcagccatcttcagccacatatggttattgccggtattgtaacagtttctatttcatccgtagtatttgcaggtattgtggctaattggctatagaaagagaggaatggattatggacattaaacaggaagctttaaaaattcagaaatcatcagtgtaggaaccttgcaggtaggaacagctgtcaatattatagccggacaggcaactatgagcatgaatgcccgttcctatgatatggaatccagagaaattacaaaaaggaagctttatgatatagcagaaggaatggaaaaaatcacggactgtaaatttgacctggaatatgtagatggatatgaaccaatcatcaatgatccaggaattgtggatctggtaatttctgcctgccgtaaaaatatgggggaagattcggtaaagattggggagtatgatgagggaagtgatgatttcagctattatatgaatgcaacaggaacttcaggagcttatttctttctgctttcaggacatgagagagaggaatgttttgtaaaccatcatccgcgatttacctggaaagaagaggccatgaaaataggagtagagagttacttgtctgttcttatggaatatctgaattagaaattatagttttcgagctgtgttacctacggtaaaaagaggtacacagctcgtttattagtattagtcgttgcttttgctgaataatttaaaagctcctgtatccggttttatctgaaaatccatgatcttgccagttgccgggtgtttaaattttaaatggcaggcacacaaagcaaggctttttcttacagctttttcattatttccgtatttgccatctccataaaggggggttccatgaccggaaaactgaacccggatctgatgatgcctgccggtgagcagctttatttctaccagacttaagtattggggatccttttcctccgtttgtatacagtctaatactttgtattccagctctgctcttttgctttcaggatcagacttatccacaatccgtgaacagttgtttttcttgtcctgcttaagataatccacatatgtcccattgttatccacaggttttccacagatcacagcctgataccatttttctatttttccctgctgaaggctggtactaagtgaagctgcagccttgggattcttggcatataccataataccagataccggacggtctagtctgtggataactcctacataaggtggctgtggatattttgaagctgtggatgtttcttttgttaatttgtggatatcttgtggatgactggccaggtgttttcgtatctcactgaccatgtccggggcaaagctttttccgctttgtgattccagaccgtctggctttattacgactataatatggttatcttcatataatatggaaagcattgttgggtttacctttcaggtgttattattttaaactttcatttaatagagtttaagaaaagttaatatcttcccggacttcaaaatgagggatctcagattttacaaaactggggataacctctctggctgtctggataaactggcgggccgcaggagataatgaagaactatcccgatacaacaacccgatttcccttgaactcacatgatgatccatggagcagaaaataggtgtatagtcaaatttttcttcataagtaacagttactggagcaaatccaaatccattgttttggggaactaaacggtacacggtaggtgaattgtcaagctccatagaaacagagggggatatttggaattttttaaattgttcccttgcaaattcataggttccatgtcctggtgtcagggaaatgaaaggaatctgttccagaatacgaggaggaatatactggagaactcccgggatgttttccggaagtattaagttatgaaaaacagctgcagtacggcttacaataagagtcatttcttcttgaaaaagagggacaaatgtcaggccatcaagatcagaaggctttgaacatataaaaaatacatcgatcgccccattttttacatccttttgtaatttagctaaatttccctcgctcagcttgacctttactttgggacagactttctgatagtcagggagaatgcggggaagccagctgtaacagcgggtgctgtgcatgccgattgagatatggtcctggacatgtcctgcgatttctctcatttctttatccagttttttcttcatttccaggatcttcaaaagaccgtctatatatcgctccccggcataggtaagccggatgggaaaggaagaccggtcgaatagtgttacatttaattcttcttccaggtttttaatataacgtgttaaagcaggctgtgatatatggcattgttcagcagcccgtgaataatttctggtatcggcaagtgccagaaggtaagtgaccttatccagatccatttatgatcatcctttctgcggaatacaaactgtaatagaggatgaaactctaatgaataagtattcggaaaattcaattcatttatgttatagaatttataaataattagtattggattatatttgcaaaaatagttacaatcatattagctgaaaataataaggctgtcaatatgatgtatgtactctcggagtctttcatgcacttgcctttgcggccgattttccgtcagtcgcacccgaattttatcaacgtacgcaccgcgtacgcctcaaaaatttgggcacaactgacaaaaaatcttctcgcaaaatcaagtacaaaaagattccgagagcacatatgtaaaaacaggaggaggaatcaagatgcgaaaactggatatggcatggatcaacgggaatatttatactgcagatgataaattttccacagtcgctgcattcggggtgtcgggagacagatttagtgttgttggtagtacagaggaggttcttgaaaattgtgatgaacacacgaagatcatagatcttcagggaaaaacagtactgcctggattgatcgatgcccatcttcacattaccaatacaggtgctatgaagctgaacctgaatctggtatcgaaacaaaagcaggagatcctggacatggttgccgatgcttacagcagtgcaaaaaaaggagagtggatcattggacggggatggatcaatgatacatgggatgatccatcatttcctagcaaagaggatctggatgctgtggcgccggattcaccggtataccttacaagagcctgcggacatgctgcatgggcgaatacaaaggcatttgaaacagcagggatcacaaaggatacaccagacccagcagggggagaatttttacataagcaggatggaagtctccttggtgtggttactgatcaggcgcaggatccatttaataaagcgataccatcgtatacaaaggaacagatccagaagatcgtattgctggcccagcaggaattcttttcaaatggtttaacatctgttcaggatgccggctcaccggaagagtgggtggaagcatggcaggaattatatgaaaaagagcgtctgaaattaaggatctatgtaagtatgcgtgtactgggacgtccgaattaccaggaactgatggaaggctctttaaaattctttaagaagggactccgcattggtatgtatgacaatcgtcttacagccagagcctataagatatcccttgatggatctttaggagccagaagtgcatggatgttagaggactatgaagaccagccaggtcataaaggaaatggaaagtggacaaatgaccagttgtattctgtattgtatgaggcgcgaagggctggtttccagacctggtgccatgcaattggagatgcagctaaccgtcagtgcctggatgtatatgaacagcttttaaaggagcttccagataaagatgcgcgactcagaagtgagcatgcccagatcattgctccggaagacatagaacgcttccgcaaactgggggttatacctactcatcagactgtatttttacggacggataaaaatgtagcagatgcacgtctgggagcagagcgcataaaaggtgcatatgcatggagaacattgatcgaccagggaaatcctttaccaaacggaacggattcaccggtagaaagctgcaatccatttttaagcatgtattgtgcggtaacaagaaaagatgagcatttaaaaccggaaggaggatggcatccacaggaagcaatgacccgggaggaagcactgcgctcttatacaaattgggcggcctacgcagcatttgaagagcagttaaaaggcagtatcgagccgggaaaactggcagattttgttgtgatcgaccgtgactatatgaaatgcccggaagaagaaataaaagatatctgctccctgcagacagttgttggcggagaagtcgtatatgaaacaaagtaaaggagaatcaggtatggagaagacaaaagaagaaaaaaaggggttgtttttccggtttattaatggtgttgaggttattggtaataaactgccgcatccattttatctgtttacgatcctgatcgtggtggcaattgttctttctgtgatatttgcaggtgtttctgtgacttatgaaagtgcatcttccaaaggaacaggcggggaaattgtaacagttactataaagaacctgttaaataaagagaccataaattatgtaacacagaatttatacagtatttattataacttttcaccaatgatgatgatgggcctgctgatgctgtccatcggactggcagaacaggtgggactgttcggtgcgtttattaagagaacgatcgcaggtgtacgtcccgcatttgtatttgccattgtttcatttattgcgatcaatgcaaatacagcctctaatgcaggtatcttaggctgtacagcagtagcagcggcggtatttgcttcaatggggtataatccgtggctgggcattattttggcatatgcggcaggtaatgccggaatgtctgccaatgtatttgttggaaatctggatgtactgttaagtggtatcaatgaatctgtatgttcttctctgggaattgacacctctactgtacatgtactccagaactggtattttatgtttgcatgcgccattgtcctgacattggtatttaccctggtaacaacaaaatttgtcagaggctttatcggtgaagcaaaggatttaagtcttatccagattggctcttcagataaagatttatctcccctggagcataaggcactccggaatacagcgatcgcagcagttatttacctggcattactggtcatcatatgcattccgcaaaattctgttttccgtgcagatgatggaagccttgttcccaactctccgttattaaagagtgtgttaacactgttatttttattctttatggttacaggaattgcctatggacgtacaactggtgctttaaaagactggaattccctgcctaagatgcttgcaggcagtattaattccatggttaatttcatggttatcgcacttccggcctccttatttatttacctgtttaatgcatctaatattccgactgcattaggtgctgcaggcgctgaatggataaaaacatcaggtatcaatggatttggccttattgtatttattgtatttttctctacatttttaaatttatttatgacttccggatcttcaaagtggatgatcctggcaccgatcctgatcccaatgctttatgcgatcggctttagcccggctttaactacagtagcataccgcatcggagattctgctaccaatgcgatcgcaccgatctcttctgatgtggcactgatcgtaggacttctcggtaagtataatacagacaagagtaaaacaccgggtatgggaacggtttttgcaggctgtatgccatatgcaatagcgactatgatcacggaactgctcatattaggtgtctggtgggcatttaacctgcctcttggccctggtgttactatgtttatcaagtaaagagaggagagaataatatggagatgcctgttttcactatccgtggtaaaaaccacagagaacgtggagtagattatggagttcaatgtaaagaactgatacagggagtattggagcgctatatccggttttttaatggcgggcacacggcggtaagctgggatgaagcaaaagtgatatccaaagaatttcttccttttatccattcttactcaccggaacttttagatgaattagaagggatcgcccagggcgcagatgtagagtttgatgaccttttaaccttaaattcacggtcagaggctatgactctggtacgcagacccccttctgataaggaggaactggatggctgttccagcgttgcagtattgccggatgcttctgctaatggacatacgatcctggcacagaactgggacacttacacatggcaggaatatggcaccgtgatcttacagattcttagagatgacggtccggatctgatgatcgttacagaggcaggacagcttgccagatatggcatgaaccaggcaggaattgccctgggagtcaacagtctgcaaaaaacatataatcctgaagtttttggaatcccatctgtatttatccgccgtaaatttttggaacaggatcgttatgttgatgcagtgaatcagatattcggagcggaatcgatgcttccaatgtattatgtggcagcttattgcggtggtgatgccatgggatttgaaaaactaaaggacggacagctggtgctgtatccggaaaatggcctgatagcccatagtaaccatatccgccatcctcattatgcataccaggtggatgctctggggggaactttatatcgtgacaggagaattttaaaacatcttcagcctaaagcaggtgcagtcaccatggaagatataaaggatgcttttaaggatcattttggatatcctttcagtgtttgcagacacggtgatagcagaaagacagagctgaaccggatcagtacgcttgggtgtatccttatggatgtgacagaccgccgcatctgggtatgtaaaggaaccccatgttgtggggaatttaaagaatatatgtgggaacgtccgcataaaaaatctgactgggatcagatagaaaaatggtgaaataaaaatgaaggatttcagggcagtaaaaactgaattggcttgttacgcagtgattatttttgcagcatttttaatggggtttgcaataaaaaacctttatgatcctgtgaaccttgttaccggcggagtatccggcgtggcgatcatattcaaaagtctgtttgatatacccttgtggctgacaaatacattgctgaatattccattatttctggctgcctggcgtttgaaaggatggaattttattaaaaggacatttatagcaactgtgtccttgtcagtttctttgtatgttttgccggaaatgaccattgccggagatgatatctttttatcagctttatttggcggtattctttccggagttggaacagggattttatttgcagtacatgccactacagggggcacggatatgcttgcagccctgcttcatctgaagatccgtcaatattctgtatctcagatcatgcaggtccttgatgcaatggtagtactggcaggtgcttctgtatttggactgggatcagcattgtatgcgatgatagcgatctatgcagtgtgccgcgtatcagatggaattttagacggtctgaatttttcaaagcttgcgatcattatttctgaacgcagtaaagagatcgcaggctcgatcatgaaaaatatggagagaggtgttactgctgtaaagtcagtaggaatgtattccggaacagaaagggacatgctgttttgtgttgttcccagaaaagagatcatctggcttcgggatattgtccgggaatatgacaagcaggcgtttcttattgtaagtgatgtgaaggaggtattcggagaaggttttattgaagatatttcccaaaaataaaagataatcagaaataacagaaggctgttttcaggtcattcaatctaaatgatctgaaagcagccttttatgatcgtggtaagatcatgataaacgcagtgcccagtctctgcagtcccatacatcggtagccagaccttcataaaaatccggttcatggcagatgagaaggatgcttcctttgtaagcctttaaggcacgttttaattcttcttttgcgtctacatccagatggttagtaggttcgtctaaaagaaggacattggtttcacggttgatcagtttgcacaggcgcactttggcctgttcaccgccgcttaatacgcggacctggctttcaatgtgttttgtggtcagaccgcattttgcaagggcagagcgcacctgatactgggtataagacgggaattccttccagatctcatccagacaggtagtcgtattgccgggagccatttcctgttcaaaatatccgatggacagataatcgcccagttccacagaaccgcttaaagcaggtgtcagtcccaggatactctttaaaagagtggtttttccaataccgtttgcacctaccaggacggccttctgtccgcgctccatagtcaggttcaaaggacgggaaaggggctcgtcatagccgatgatcagatccttggtctcaaaaatatatttgcctggagtgcgggcttccaggaaatgaaactctggctttggcttctcttttgccagttcgatcacttccattttatccagtttcttctgacgggacatagccatatttctggtggaaacgcgggctttgtttctggcaacgaaatcttccagttcagcgatttcctgctgctggcgcttataggcagcttctaactgagccttctttacagaataaacttcctggaatttgtcgtaatcgcctacgtagcggtccagacgctggttttccatgtgatagatcaggttgataacgctgtttaagaatgggatatcatgggagatcaggataaaagcattttcatattcctgaagatagcgctttaaccattcaatgtgctgtacgtctaggtagttggtaggctcgtcaagaagcaggatatccggcttctgaagcagcaactttccaagaaggactttggttctctgaccgccggaaagctctgttacgtcacggtccataccgatctcatccagacctaaagcccggccaacttcctctactttggagtcgatcacatagaaatcatgtgccattaaaaggtcctggatggttccaagctcttccatcatggcattcatctgatcttcgtctgcatcccccatattgtcacagatatggttcatccgctcttccatctcaaaaagaggagcaaaggcgctttttaatacttcccggatggtcattcctttttccaggactgtgtgctggtccagatagcctacatttacgttctttgcccactctaccttgccttcatccggcatcagctttccggtgataatgttcataaaagtggatttaccttcaccgttggcacctacaagaccaatgtgttctccttttaaaaggcggaaagacacatcttgaaaaatagcccggtctccaaaaccgtggcttaaatgttctacatttaatatactcattcaaaaactccttataaaataaatatgctctcggaaacttccaagagtacatatgatcaacagtagcacagataagcccattttacatgagaaatcaggctgtggcaaccgctttttcactgctcttgaggtttgtttgggaatgtgttaagatggcgtcaaacaggatttatgtgaatgcaaaagataagttacaacaaggagataaaactacttatggaaaaacagaaaataaagatcgttcgcaaaaatgatgagtattctgcggaataccaggttggtgacgtttttcaggtggacagtacctggtatgggggagtgaatgttacaagcgcgtcgggaataccattgtctttggacaaggatgagtatgtgcttttagaggaagcagaaaaggagcagcccattgacaattattcctatcagtgtggtgtgatggactgcttctgtgaaatggtggcgtccggccttaaaaagctggcaatgagccatccatgtgacaccaaagcagaaagagactcttatctgccccaggtaaagaagctttgtgaaaaatatgggatcctttatcatccacaggatgaggcgctgatcacagatctgttcccggcagaggcaaatcaggacaaatataattatttatttttccgtactcaggacgtttatgagacctatctggaactgaaaaaacgccagaaagagctggaaaaccagtgcggaggaactgaggaagaacgctatcagctggcagcagactttggagccctgctttcttatccggaagaaggaatacgaaggctgatcgaaaaaacaagagaagccagaagataaaaaagagtgcgcatcgttggcacaaaaagcagacctgccgctacagcaggtccgtttttaatacaaagtgatttttatctgtctccaggatcccttcttttcgcattttaccaagttccgccgacatggcgcttcggtcaatgcttaaatagtcagctagctgctgcctgttaaatggaatacaaaaatcccggctgcctgctttggaggcctgaaaagaaaggtatgataacaggcggccacggatggatttggaagaggtgtggaagatccgtctggacagatttagatttttctgggaagagatatataacaggttctggatcaggcggttgtggtgggtgcaggcagaaggacaggtggtcagtacccgtcctgtatctaaaaacaggatatgggaaggttctgctgcaatggctgataccataaggggttccccgggaagacaggcatagctttccgcaaaggcaaagccgggaccaacactttccataacacttttattgccccagacatcatcattttcaatctgtacccggccggtcagcaccagtccgatattgtggatgacatctccggcatgaaagatggtctcacctttgtcataatcccgttcctctgtgccaagacactggagcataacattgatctcttcagggggaacatctttaaataagggtgcattttccaacagtttataatccattttctctccttttgttgtcagaacaacatacatttgcaggtgattgtagtatattccttatataatgtcaaggaggtacaaaaatgatacgcaggatcgttcatattgatgaagaaaaatgtaatggctgtggcctttgtgcccaggcctgtcacgaaagtgccattggaatggttaatggcaaggctaaattattaagagatgactattgtgatggtttaggagactgccttccggcctgtccggcaggtgccatttcctttatagaaagagaagcagctgcatatgatgaggcagcagtacttgaaaataagaagaaaaaggcagcagcggcccatcaggctcctgcaggcggatgtcctggcacccgtatgcgccagatgaaccgcagaagcgaagaaacagctcaggaaggagaaaatacttccagtgcagcaccagttacttcccagttaagcaactggccggtacagatcaaactggcaccgatcaaggcaccatactttgatcaggcaaagcttttgatcgcagcagactgtactgcctatgcatacggaaacttccacaaggattttgttaaaggcaaagtaacactgatcggatgtccaaagttagatgactgcgattacagcgaaaaactgacagagatcattgcagccaatgatattaagagcgttacgttagtgcgcatggaagtgccatgctgcggcggtttagagcaggcagctatcaaggctttaaagaacagtggaaagtttattccatggcaggtagtgaccatttctattgacggtaagatactggattaacgtttaggacatgtctcacgcccgatgggcggggaaaagattagtttgtagcaggagaaaactaaaatggcatttattaaaaacattgaacacgaaaccgtacttccgttagcagagcaggtaactgtacagccgggacagatcgtcagccgtacactggctcagaacaaggcagtcagcgtaactttatttgcctttgataagggcgaagagatcagtacccatgactccaccggcgatgctatggtacaggtactggaaggaaaaggaaaatttacagtaggcggaaaagagcatttctgctgtgctggtgatgtcctcatcatgccggcaaaggttcctcacgctgtttacgcagaagagtcctttaaaatgctgttgactgttgtatttccaacagaacaggagtaaagatatggagtccgcagaaaagaaacgaccaggggatatccttacaggcgctttgatcggacttgccaggacaacttacagtcatttaaagacagaagatacagacagggtagtaacatgtgctctgtctgttctggcaagaccggatgccggtgaggaagaacttgcccaacagttaaaacaggtaagggcagaaaaactggcagtagccccgggctgtgctacctgtgtggcaaaatgcggaaatacagatgattatgatatggagcgcctctggaacggaccggaccaggtgcgctctcttaagatacgtctgttttccgggctgaaaaagacaggcagggatgcttttaaagttattgaaaacggaaaagggaaagacaaacatttccagagtattatggaaagtatctataaaggactttttatcctggcagaggactgggaaccggaagagatactgccggctattgctgaattagatgaagcagagatcatggtgaaggaatttctctaaaaaaatattttagaaaattattggaaaaatttggcaaaaatgccaaggaagcattaagggtattcaacttgaatagaaagtataagtatggtaaagtaggaataatgataaaagtacttaagaaaagaggaggtacagaagatgccagggcgcagggaagagaatgccggcaaaagaatgttgaagcatctttccgctattttggagaaaagcggtgtcattatatttgaataccatataaaaacagatactctgatccgttacaataaagagctggaagtagaagtggaaataccgaagtattgtgattatctcagggataagaccaggatctacccggatgaccgctggaaagccattgaattttacagtgggcgtattaaggggcccattgatatccgtgaagtagatgatgacggctatgtttccagaaagcgcctggagactgtatccattgaagaagatgaagaagaaggtagatcttgtatcctctttggcatggtcactgatgtaaccggggagtggcatcaggaagagcgcctggaacgggaactgggacagtaccgggaagaagaggcaacctgtaatggttgtgccggttatcctaaatatgaccaggttacaggtctgctttcttttaaccgtttcagggaagaggttgacagtgtgatcgcttccggaaaaggaaaaagctgtctcttagtttacacagatcttgaaaactttaaatattttaaccggaaatacggttatgcagcaggagaccagctgctgcgggaatttaccggttatattattgatactttaaaaaagcgcaatactgcccattttaccagggtggtcgcagatcagttcattctcttctttgaggaaaaatggaataacggttccatagaagccattaagcgtatcaataatggatttattgagcggcagcagagaaaatatccggaagcaaagctgcgcctgcgcaccggtgtatacaaagtagaaaaagactgcgacggagcttcgtttgctattgatgcggccaactatgccagacgccagatccaggataattcccctgagactgtatgtgtatatgataagaccatggcggatctccagaatatggaaaatgaaattgccattggcttagataaagcaataaaaaataaagaatttaagatctatctccagccacgtttctccctgacaacaggaaagatcgtaggtgcggagtctttagtccgctggcagagggaagatggtacgatcctgccgccggacagttttatccctgtttatgagaaaaacggccgtatcattgacctggatttttacatgtttgaggaaacggtaaagcttctggcaaactggaaggaacaggggatcccgcagcgtctgatctccatcaatgcgtctgcccttcatgcccagaacagtgataccgttcaccgttatacaaccatcctggaaaaatacggtgtggacccggctcttatagaactggaattaacagagacagctacagtttctgattatgaccatgtaaagcagctgtttgcaaagttacagactgtcggttttaggacagccttagatgattttggagccggttattccatattgaatacagtcattgatattccggtcaacacagtaaaagtggaccgggcctttatcagcaactgtgagactactcataaggggatttacttccttcgtgagatcatcaacctgttaaaaggtcttggttatcatattgtatgtgagggagttgagacgccggaacaggcgtccatccttagaaataccatgtgtgatgaagtacagggatactggttttcccatccggtcccagcacatgaatttgaaaaaatgctgcaggaggggcggtagcagagaatattatctgcgccgcgcctcctgcagccatgttacagcctttttataattttctttataatagcagatcttgcccttttccagggaaataaatccctcttcttttaactggctgatggtacggtttaatgtttttacgttgatgcttgtttcatcctgcaactgctgtctggtcagattgatcttataaagaagaccatccggctgatcacagagcatgcagatgaccgccaggctcttttacaggcccatatgaatgaatatccgggagaagtgaatttcttccttcagcggttccaaaaacgtccttatgaatatctggactctttccatgttttaagcgaccgctttatcggtgcccacagtatcatggtatcggctcacgaaagagcactgctgcgtgagcgtgacgtaaaagtatgccactgtccgttcagcaactgtggaaaaggagttccggagacaccggcacttttagaagatggaatctgcgtaggacttggaacagacggtgctgctcacggtggtttaagtctttggaatgaaatgaagatcttccgttctgtgatgaacgtaaaacacggcgttgcccagagcaatccggctatcatgtctgcagctcagatcatttccatggctacaaaagagggataccgcctgatgaaagaggagggcggtgtgatcgcagaaggcaaaaaagcggactttattaccatcaataccatgcagtctcatttatatcctactggtaatctggtgaatactctgttagaatgtgttactgcgtctgacgtctgcgatatggcggtagatggcagactgctgatgaaggatcgggaagttcttacactggatgaggaaaagatcctttatgaagcgatgaaatacatggaggaattagaagcatgatcacaggtatcacattctgtctgatcgtaacaatggccaatctggtagtaggagcatttgtaggacttacaggtgtggcaggtttcctgctgccgatcacttatacatcccttctgggactgggcacgacagagggactggcccttagctttggtgcttttatcctttctggtcatgcaatgcatgaacaggaagcagcttttttaattagaccttattggaaatggggttgaaaaaataagggaaactgattaaactgattacatgaatgtattatatagaaagacaacaaaagggatctgtgtggggcgctgctacacattagataacaaactggtgataccggacaccatagaaggacttccggtaacagaactggatacatatacattctcccagactgtgcgaagaagagaacagccgccggcagaatacgaaggagagccggaaatgtgcggtgaagccctggaggaacttacgctgccgaaacatctggaaaaagtaggggcctatgccttttataactgtttccatttaaagaatctttcctgctgcagtacagtgagagactggggggccggagtatttacaggctgtacccagataaataaactggatatccgtatctttccagaggaaaaatccagttttaaagaaatactttcagaactgcggcagatgctggttgtagattaccgggataaagaagggaaacttctggcaaagctgatctttccggagttttttgaggagtccatagaaaatactcctgcccgtatcattatgagggaaatgcatggctgcggtcatatgtaccggtattgttttaacggaactgattttcagttctgggaatatgacaaactgctgccaacagcagagatcttagaaagcccggcccttgtatgccgcatggccctttaccgcctctactggcccaaaggtctgacagaggaatggaaagaagaatactggaaatacatcaaaaaacatccggatgaagcagcaaaaggcctgacagagcggggagaaagagagatcctttcctggctggcagaggcaaaagagacggacagccagatgttagagcagatgatccaggctacagcaggactgggggatgcccaggtttctgccattcttatggatgcaaggcataaaaagatgggggcgcagtcgggggataaaccgaagcccagagtccgaacttttgagttatagttttcaacgggagttggtcccggttttcccgctttagcgggaagtatatactaatgtttctctccgccctcaggcggctgagtattacttaatttacggaggaagatcccatgtccaagaaaacaaaagcacaggaattacaggagcagcttacctggtctgctccccatattggaaaagacgcaccagaccacaaggaaaaagctttcaaatactgtgaaggctacaaacagttccttaacgcaggaaaaacagagcgcgagtgcgtaaaagaagctgtacacatgttaaaaaaggccggttacaagccatttgaccgcactgcttcctatgaaccaggagataaggtatattatgtaaaccgcagaaaagccattattgcaactacctttggcaaaaagccattatccgaaggtctgcatatcaatggagctcatattgactccccaagactggacttaaagccaaatccattatatgaaaaagaagatatagcctactttaagactcattactacggcggtatccgcaaataccagtggggaactattccgttagctattcacggcgttgttgcaaagaaaaacggggaactgacggaaatctgcatcggtgaaaaagaagatgaccctgtattctgcattacagacctgctgccacatctggctgcaaagcagaatgagcgcccgctgcgggaaggcttaaagggagaagaattaaacgttgttttaggttctcttccatatgaaggagaagacatcaaggacgctgtaaaactttctatcctggcactgcttcatgaacagtacggtatgaaagaaaaagatttcttccgcgcagaatttgaactggtaccggctgtaaaagcaagagatatcggtttagaccgcagtctggtaggcgcttatggccaggatgaccgtgtttgtgcatacacagcgctgactgctgagattgatacgaaaaagccggaacacaccacagtgaccattcttacagataaagaagagacaggttctgacggaaatacaggtctgaattccgattatgtccttcattatatagaagatcttgcttctatggagaaggttgcggtacgtgacgtattaaaggcttccttatgcttgtcctctgatgtaaatgcagcttatgacccgactttcccggatgtatatgaagcgcgcaattccagctacatcaacaaaggctgtgttctcactaaatacacaggcgccagaggaaaaggcggctccaatgatgccagtgcagagaccatggcgaaagttatcggcattatggaagatgcaggtgtttactggcaggcaggcgagcttggcgcagtagatgcaggcggcggcggcaccattgccaagtttgtagctcatatggatgtggatacagtggacttaggtgtgccgatcctttccatgcatgctccttttgaacttgcttctaaattagacgtttaccatacatataaagcatttaaggcattttatgcgtcataaaacttattgtaagggcttttttttcccgacggtgtatggtataactatgtacaacgcttaaagaaagtctgtttttgttttccagggacggacaaaaagttcctgacagaacaaataagcgaaaagaaagaaaagaaaaggacatgcaacaatgagaaaactgaaattattatgtttatgcggtctgactgcagctgttctgatgaccggatgcgcaggcagcacagacaccacaaatgtaaaccttggttctgcaactgtttctgagtacagaggagtaaagatcaatgtagcagctccggaagtaacagatgatgaagtagaccagaagatccagaccaatctgaagcaaaatccaaatgaagtagaagtggacagagctgcgcaggacggcgatatcgtcaacatcgactacaagggaacaaaagacggagaagcttttgacggcggtaccgcagaaggacaggatctgactcttggttcaggatctatgatcgacggttttgaagacggtctggtcggagcaaagaagggtgagacaaagaccttggatttaactttcccggaaaattacagagaagagtctttagcaggacaggcagttgtatttgaagtaactgtaaatgctgtaaaagaaaagcaggatgcagtattagatgatgcatttgtacagagaacttctgattaccagactgtagatgagtataaggaaggcatccgtgctgacctgttagcccagaagcagaagacagcagagcaggaaatggagcaggatgttcttcaggacattatcgataactccgatttcaagttctccagaaacggtttatctgtgcgttacaatcagatgttaaagcagtataccaaccaggctaagatgtacggaatgactctttcccagatggctcaggccaatggtatggatgaagccggatttaaggaatacatctactcttctgtaaaagaagcagctaagaaagagatcgttgtaaaagacattgcagcaaaagaaggtcttgataacctgacagatgaagataaagaagcatttgcacaggcaaatggaaccagcaaagatacactggtaagcctttatggagaagatactgtaaatgagcaggtccttcaggataaggtattaagatttttagcttccaatgcagacaatgaagcagaaaatcctgcaaaactgtctgagcgtgaagtaactgttactgaaacttcagcagaccaggagtcttccccagaagaaacaacagaagctgaaactacagcagaagaaacaaaagcaaactaaaatattatattcaaaacaaatggataaggaggatattatacatgcaactcttaaaagataggatccgtaaggacggcaagatcaaagcggggaatgtgctgaaagtagacagttttttaaatcaccagatggatattaaactgtttggtgagatcggaaaggaattcaagcgcagatttgcggatgtggaagtaaacaagatccttaccatcgaggcttccggaatcggaattgcatgtattgtagcccagtattttgatgttcctgttgtattcgctaagaagacacagaccaagaacattgctggtgaagtctatacttctaaagtagagtcctttacccacggcagagtatatgacattatcgtatccaaggaattccttggaaagggcgacaaagtgcttcttatcgatgatttcctggcaaacggaaaggcgttagaaggtctggcagctttagtaagagattccggtgctgaattagtaggtgctggtatcgttattgaaaaaggcttccaggtaggcggagatctgatccgttccgaaggaatccgtctggagtcactggctattgttgacagtatggatgaggagacaggaaccattgttttcagagatgatgaataataacagaacaaaagctttattttttgatattgacggaaccctcctgtctgaaaagacgcggagggttcctgacagtgcgaaagaggcactgaaacaggcaagagaaaaaggacatctggtcctgatcaatacaggccgtgtgtatccgcatttacatgagatccgttcccaggtagatgcagatggatttctctgcggctgcggtacttatgtgagagtaaaagatgaggtcttatatcaccatgtgatcccacatgaaagaggactgcagatcaaaaaagacattgatgactgcggtctggacggtgtactggaaggtctgggcggctgctatatgcatgaagcaccatcctgtctgccgcaggtagagcgtgtaaaacagtttgttaagctctccggctgtccaatgccatgctactgggaagatgacagttttgattttgacaagttttacattggttctgatgaaaagagccgctgcaaagagctgtttggaagaatgccggatattgaggtcattgacagggaaaagggcttttatgagtgtatcccaagaggtcattccaaggcaactgccattgatcttgtgttaaaacactatggcatttcaaaagaggatgcttatgtatttggtgacagcagcaatgatctgtccatgttccagtatgcagtcaactgtatcgccatgggagatcacagtccggtgttggaaccatatatatcttttgtaacaaaaacagtagaggatgacgggatcgcctatgctatgaaagagctggggatcatataaattatgaaacgaaaaacctggatcgtcagtgccctgatgtatgcccttgtatttctggtatgcttcggggtattgcacgtttttaagaaaataacaactgccggagacagtacggagtacacctctaaggctgcggcagagaccaatattgtaattgacgggtctgcagatgatacagaccgtgaaaatggaaaaatggacggggctgaaggatcagatctgtcagaagatacagatgaattatggaatgagacggagaaaaatacccatatccgacgggaaacaggctataaaggctggagtaagacattgcctcaggtttggccggaggtcccggaagaagagcattatacgcctccaaggatcatccaggcaacggatgttcattatcagagcgcagattcagaggatgacggagcagcttttcagctttttgtagagcgctgcgacggaaaagtggtaaaatatcttccccagctgttagatgcttttatggatcaggtgatcgctgaaaaaccaacagcactggtactcagtggtgatattaccatgaacggggagaagatcaatcataaggaactggctgagaagcttcacaaagttcaggatgcaggtattccggtactgatcatccctggaaaccatgatatcaataatcccaatgcggctgtttattttggagatgagaaaacatccacagacagcgttaccccggaagaattttatgatatttaccatatgtacggttacgatcaggccatcagccgggacagtgcttctttaagctatgtttaccagctagatgaaagaaaccgtcttttaatgttagactcctgccagtatgagcctaagaacctggtagaaggccggatcaaggcagagaccttggtgtggatggatgagcagttaaaaaaggcccaggaagacgggatgcagatattgcctattgcccatcacaacctgctggcccagagccgtatgtatacaacccagtgtgccatggacaataatggggaggtcattgatcttcttcagaaatataagatccccctgtttttaagcggtcatcttcatgttcagaggatccgcaagcacaaggcagaaccgggagtagcagatgatgcctatggcatccaggagatcattacagatgctatgagtatcccgccctgccagtatggcgttttacagtggaaagaggacggaagcatggaatattctacggagtctgtggatgtatcagtctgggcaaaacgtacagaacaggaaaatacagatctgctggattttgtgggctggtcggaacattacattcagaagctgatcgcagaccagatcggcggagtagtccacaatgtaggaagtgatgtgaaacgctccatggcagtgacctacgcagatgtatatattgattactacgcaggccgcaacattgatgccaaaggagtgagaacttcgcaaggttatacctggtgggaacgtaacctgccggacagctatctgttaaaagaattaaattccatgatcaatgactctgacagggataataattacctgctgcttccggaagataccatcctggaagaacggtatgcatggaagaaggctacggcttctgaggcaagcccgtcagaggcaggtcgccagtgatgcgatctgttggaacagatcagtccgcagtgacatccgaataaaaatctgcaagcataagatcaaccatacgcccatagcttaagacaccatctgtctggctgtgggcttttaaatatgtatcatttaccttggtggacacctctgccgtctttccctcaaaacgatcccagaaaacattattttcttccaggtcatttctggctttttcatctaatttcttatatagttctataaaaccgtcataatccgcttttgccagagcatttcccgcgtatacccagccagtgagataaccgctgtagcgaaatgacctgctttctgaaccggtgcaggccaggtaaccaataaaattggcctcatcttcccgcatatatccctttaaatgagacagttcatgacagatggtatggggaatgttgtaggcaggtatctcactgttgtagttggcttctactgtaaaaggagaatagacgccggtcagctgttggacagataaaagccttggatggatcagaggctttggatatgggtaccagcttttaaactggggatactcatctgccagtcctttcatggctttctgccctcctttccccatttcccgaagataggaaaaattctgaaaataagagaaattcccggcatctgaaggagatggggatgtttctgttggtatattttcatttaccttatttacaagatcactgcaaagagcatagagttcatcggtagaatgggtccggatcacaaaaccagcttcataagaaaaagaattccggtaataattaatgccgcagttgatggtaaataagaaaaacaggagagaagctgtaaagaatgcaccatttaacagatataatggcgttttaaaccatttgaccacagaaaaaatacaaaggagcagaagcagatacagccctacttctgatacagaaaagggaaagatcccgaaaatacgcgcaaatatccctttcaggacaggatatatagttacagaataagcctgggcaaagccggttaccttcctggcgcaaaggcttaacaaaacagaaaggatgctcatgatcacaccggcagcaaatatttttttcaagttcacgacctccttcagatcattgcggatacccccattataaatgcttttgccttgactgaaaaggtggtttcatctatactgaaatgagctaagaagagaaaaagttatataaatataaaaaggggaaacagatatgggatatcaggacgattatgtaatgcgtaccatcagtgacttagtccgcgccattgcaagactggcacttggaaaaaacgagatcaattatgcccttccggatacagaggataaatacagcgatacagaccgtatttatcggaaactgcgtgatctggtagatgcaggtgagatcaacgaagcagagaaccagctttacgaaaatctggatgaaaacgacacagaacatctggaaatggcactgactttctatatgtatttaaaccagttagatgatgatacacttttcatggcaaactattccagagaagagatcgtagaagggatcaacagtgtcagcgcaagctttggcattaccggatttgaaaattttgtagataccaccatggtttagccagatgacggtgcggatcataaagttccgcgcacttacaggcgggaccacaagaaacacagggggctgctgcaggatgccttaaaattttgcagcagccccttgtggcggatataagaaaacggacatgtcacctgagggtgatatcgccatgaataaaagaggacatccatggaaataaaagaagaatgtctggcctatctggggcagtattataaagagctgttttttggaacagccaataaacgataccgctccatgacaggcgcggacttaaaacaccgcttaaatcgtttaagccaggagactttaaacggggtggaaaagccaaatgaattaaacgatatccatgccatgtttgcaaaagtgtgtgcctatctcatgcacaaggaagaacgtttaaaaccgggcccggccctggaccagttaaaagaaaactggaaaaaaatggaagatttctgcgggatgctggcagcaaaagatatggaatacctgccggagctgacagaagaagagctggagcatgtattaaaaatgcagggcatccgccgctaccttcttaccaactccttagagcgggcttatcagctgttttatcttccaaagactattaaaaagggaatacgggagtctgtaaaacgccgcccggaggatgaatatccggagaccagggccatgaagcgccgctttatccttcatatcggaccaacaaacagcggaaagacccacgatgcattagaaaggttaaaaacagcttcccacggcgcctattttggtcccttaagacttctggcactggaagtttatgaccggctaaacggtgaaaacattccctgttccatgataaccggggaagaaacactggaagtggccggtgcctgctgtcaggcatgtactgtggaaatgttaaatgaacacgaatatttcgacgtagctgtagtggacgagtgccagatggtagcggatccctacagaggccacaactggaccagggcagtcttgggacttcgtgcagaggagatccatctgtgtatggctccggaggcggaagatattatcgtgcagatgatcaaacggtgtggggatacctttaagatcgtccgtcataagcgaaatacaaggcttaccttagaagaaaagccgtattccctgaaaaaagatttgaaaaaaggcgatgctcttatcgtattttcaaagaaatcagtactggcgctggcggcccacctggaaaaccagggagtccattgtagcgttatctatggaagtctgcctcctgccaccagaagagagcaggtgcgccgcttcctggaaaaagagacagaagtggtagtcagtaccgacgccattggaatgggcttaaacctgcccatccgccgtattgttttcattgagacccggaaatttgacggagtaggccgcagaagccttctgccagaggagatcaagcagatcgcaggtcgggccgggcgttttggtctctatgacgaaggttttgtggccgtgctggacgatctggaattaataaaagacggactggaacggcgtccgatccccattatgaaagcctacatcggcttcccggaacagctgttaaagctgccggctgagatcgacacactggtaaaaatatgggccagtatggaaacaccttctatttatgaaaaaatggaagtagacgagctgcttgcgctgtatgtaagctttgagcatgtacagcgggatcatatggacgaattttccaaagaagagatctataagctgatcacctgctctgtggacattgacaataagctggtcatggatctgtggaaagattactgccgggactaccgggatgtggaagaactgcagtttccatacagtccgggaccggatctgtatgatctggaaagctattataaaatgctggatctgtatttccagttttccagaaaagtgggactgcctgttcaggaagaaaatctggtggaagagcgcaggaacacagaagaagagatcagccgtattttaaagacagaatgtgccagctacacccgaaaatgcacaatctgtggaagagaactttcctgggattatccgttttccatctgcgaacgctgctttgaacgtggaaaaagagtacatcccagaagaagataatattaatgtactcctgggatttttccgggggcaaataacacatcaaaggagaagagaatggaaaagagaattattcaggtagaagaaaaagttcctgtaaaattgctgatacccttaagtatccagcacatgtttgccatgttcggcgcgtccgttctggtgcctttcctttttggcatcagccctgcgatcgtactgttcatgaatggtatcggaacccttttatttatcgcgatcacaaagggaaaagcaccggcttacttaggttccagttttgctttcctggcacctgcatctattgtgatccagaattttggctatgaatacgctttaggcggtttcgtggcagttggtttctgcggctgtattttagcacttattatctataagtttggtacagactggatcaacatcgtacttccgcctgcagccatgggcccggtagtagctctgatcggtctggaattatccgccaatgcagcttccaacgcaggtctgctggatgagaacattgatccaagaaagatcattgtatttatggtaactttaggcgtagctgtattcggttccatcctgttccgcaaattcctggcagttatcccaatcttgatcgcagttctggcaggctatgcagcagccatcatctgcggaattgttgattttgaggaagtagccgcagctaagatcatcgctatgcctcatttttcctcaccgaaatttgatgctcaggcgatcatgatcatccttcctgttatcctggtcatcatttccgagcatatcggacatcaggtagttaccagtaagatcgtaggaagagatctgttaaaagatccgggacttcacagatccttatttgcagataacttctctaccatgctttccggtatgatcggctccgtaccgactactacttatggcgagaatatcggtgtaatggcagtaaccggtgtatacagtgtccgtgtgattgcaggcgcagccattctttctatcatatgttccttcgtaggaaagctgtccgccctcatcagcaccatcccgggtcctgtgatcggcggtatctccttcctgctctacggcatgatcggaacctccggcctgcgcatcctggtagactccaaagtagactactccaaaaaccgcaaccagatgctcaccagcgttatcttcgtaactggtctttccggcgcagcactgcgtattggtaatatcgaacttaccggaatggtacttgcctgcgtagtaggtatggcaatgagccttgtattctatgtattagacagattgaaactgaccaatgatcaggcggagtaaaatgtttttggccttgcggcattgctatctgacaacattacgaaccggataaaaaataggcgattgtggtttcacagtcgtctattttcatagcatccgccgtacaagtatttcttttgtatattcctcccgtatagccaccacccgcctgcgtattctgtatatacacagctgccgggccggattttttaacagacaggtcaggacctctccgtacagaaatccgcttcggccaagcatttctcttacatctgcctctgagatgatccatactacctcagccatttcaccttcgaccaggccggataaaggttctaccacagtttcacgtccaatattcccactcttttaaatatatgcgtgttatggttggctatatgatgctggattacaattcacaatgtgttcttgtatcattatcatacagtaatccaacttccactttttcatccatatccatagaattttccgtcacaatacaatcatatgctaaaatatgtaccccggctgcagctgctgcccgcagggcatccccgaaagccttatgtgtctcatcattaggataaaatttccggatccctttcatctggatcacaaggagaagaaaggtctcaaagccatccttttttgcctgtatcagcccgtttaaatgtttcacgccccggatcgtaggtgcatccggaaagaatacatttccctctttttccagagttactccctttacttccataaaagcaggaactgttttaccagttacctcatcctttaattcaaaagccaggtcaaaccgggactcaccatgagtgacttcccttcgtatattcgttggaattccaacattttctaaagaaagcccttttgcctccttctcacgtatccactctaaagcagcctgattaggcgcctgggagtccatattgatcagcagattccctttataaacagcaatcaggtcatattccgttttccgcttcatttcctttgccttgggatgaaattccagaaccacggtacatccaggtactaaaagctcctggcagcggccggtattttttacatggcaggtcttaacatccccctttacctccacataggcgataaagcggttaggacgttttaaaaaggttccggttactatattatcgtatgtcatatctatacctcgcaagcatttgcatttatggtgctgtcatcattcatttgccatggagtataacacaaaagaaaacacaaaaaaagcttttgcaaaaaaggcattcctcattttacaaaagcttttataaattgtatcattattgcagctttggtgtgccatatctttcagaccagatctttaaacttcctttttatcagttctgcgatcatatcggcagttccttcgatccccaataaagaagaatcgatcataaggtgtttatgcaggggatcataaggtgtatatcccgcatactttttgtgataagccagccgggctttatctactttcatgatcatccgtttggcttcatcttcactcatttccagactgtggatacagttttccagccttgctttataaggcgcgtagataaaaatgttcactacattttcctcattctgaaggagaaaatcagagcagcggccaacaatgatacaactggactttcttgccagatccaggataatatccttctggacatcaaagatcatatcctgtatgtattccttgtctgtaccaaggggaaacatgtgggaaaagaaatgattgtgggagctttcttccgcatcactgatctgggataccgggaggtttaactgttttgccacttcatctacaatatccctgtcataatattcaattcccagtttctgggaaagggcatgggcgatgggacggcccagacttccaaattcccttgtaatggtaatggtgtatttactcatagcatctggcctccttaagccgtaacgatggttttctggtaactgcgtacaatacagctaagtgcaaagcagatcacaaagtagcagagagcttcaaaaccgatcagcatgatcattccatgtacgtcatagatactgcccataacaaccgcacagttgcgcatgaactctgccacatctaccattttcaggaaagaagtatctttgatcactgtgatcacctggcttaaaagagccgggatgatcttgcggtaagtctgaggcagaatgatataccacaatgtctggataaagctaaagccctgtgactgggctgcttcaaactgacctttggaaatggagtttaaaccgccgcggacaatttcagccataacagcagaagtaaataaggagatggcaaaaacagaaacagcgatcttatttccctttactgtaaaatagatccataagatccacagcaggtttggggtgcatcggaaaaattccgtatatacggctaccaggctggcagcccatttaaaacggccggaagcataggtgcggatcaaagccaggatcgttccgaaaaacatactgatcagtatggctaatacagcaatgacaatggtcattcccagtccctttaacataaaacctgtattggcaggtgtaaaaatctggtgaaataatgtcagcatgtgccttcctcctcaaacagtatttttttaggcgccggcatacgcatggaacggatctccagatatctggcaagtcgtgccagcggaaaacagatgataaaatataaaagcgcgctggtaaaataagcctgtgcgaagaagtttcgttcagaaccccatgaatcggtaaaatacatcagatccatacctgccaccatagcaagaatagaggtgtttttcaccaggtttaacgcctggttggccagaggcggcatgatgatccggatcgtctgggggagtatgatataatacatggtttccagataagagaagccctgggaggcagccgcttctgactgccccctgggaatggcttcaataccggtacgtattacttctgatatgtaagctccgtgataaacgcctacgccgatcacgccaagaacgaattttggaatacggaaaccggagttggaaaaaagtaaaggtaatacagagtagtaaaatagtacctgaagagccagaggcgtattctggataaattcaacatagatacgtgacaggatctttgcaggcttaaatttcattgtggaaaaggttccaaagatcacccccagaataagagcggtcagaagacctgctgcggaaatcttcagggtcattataaaaccgggtacataatagtctggaacggctttccacaaagcggcccagcgttttccatcaaaaagaccttttatcatatctgtcatcctctgcttttctgacttatatttaatgtaccggagtacattttatgcaaagcgcattttactgcagtccccactgatcctgaagggctttcatagatccatcagaaagcatggaggttactttcttatcaaccaggtctgcaagtcctgtattttcctttgcggaagcaacgccatattcctgctcacagaaacggtctggaagaatgtggttagaatcatttacataaccggaaaggatcgcacggtctacagagaagcagtcgatctgcttggttgcaagagcctgtgctaaagcaggatagccgtcaaattcctggaattccggctttacatccagtttctgttcttctacataagaggtaaagccatcttttgtggtagaagactgtgcaacaccgatgatctttccattcaggtcttcaatggactcaatgccggaatcattattaaccagaagtcctacagcatctgtatagtaaggtgtggagaagttgtaggtctcttttctttcctctgtaatcgtaaaggttgcgataaccaggtcaatctcaccgttttccagaagaggtcctctggtctttgctgtaacaccctggaattctaccagtttcttttcctttgcttcatcagcggagcagccaaagatctcaccggcgatttcatatgccagatcatcttcaaaaccttcatattcaccggttgcagtattctggagagaaaaattaggaacatcggatttgcagcctacctttaatacgccgcggtcgatgatcttttgtacatcagcatcagaagaacctgctgcttcggatgcggcttcggaggcagctgcagaagtatctgcgtttgtttctgtcggtgcagcagtagttgctgtagaaccggatccgcatgcagttaaagaagctgccattacagttgccattgccatagataatactctttttttcataatcagtgtcctcctcttatctacaataaattactactatatttaatccttctcagagagaagaaataaacagttaatataataacaaataactaatgtagtatcttacttaaaaatgcttttgtacggtcatgctccggtgctgtaaagaaatgctccggagttccctcttctataatatagccgccgtccataaatattacccggtcagccacctgccttgcaaagcccatttcatgggtcacacagatcatggtgatattttcgtgtgcaagctcgatcataacatttaaaacttcctggaccatttccgggtccagtgctgaggtaggttcatcaaaaaggatcagaggctggttggtacacaaggctcttgcaatggccacacgctgctgctgtccgccggaaagctgggcaggataatttccggcttttgcttttaaaccaactctgtccagacattttaaagcagtttcacgggctttgtccttaggcacatgctgaagttttacaggagccagtgtcaggttttccagaacggtcaggtgtggatacaggttgaactgctggaataccatggaagaatatttttttgccatttccaggcggttcttttttgttacaggcgttcctgcaatggaaatagtgccggatgtaggctcttccaggtgattgatgcagcggataaaggtggacttaccggaaccggagggcccgatgatgaccagcttttctccttcagctaccgtcaggttaatatcctttaaaacctccagatcaccgaaattctttttaagatgttctacttttaccatatcagccatatttctcaccgtctgccatcctgtgtgccggaacgtgcagcctttcttaaaaataaaatcttgaaaataaaagccaggaataagaaaaaggccacagcgcagagagagcaattgtctttcagcaccgtcgcctttttttcttaagtgtcagttcaaattttatgttttgcattataagcaggtaaaaatcaaatgtcaagtacaaaaaactttttttatattgcggcacgcattgaaatatgttacactttttccaaactaaataccagaataaataataactgtgcaatgtttattttgttattaaaaaatttatcaaagtaaagtaagagagggagaaagatcatggcattatcctacgaaagtaccagaggcggacagaaaggcgttacagcatcacaggccattttaaagggtctggcagaagacggcggtcttttcatgcctacagagatcccaaagctggacaagaccttagagcagcttgcgggaatgacctatcaggaaacagcctatgaagtgatgaagctttttctgacagactatacagaggaagaattaaagtcctgtatcgcaaatgcatacgatgacaagtttgacacagaggagatcgcacctttagcaaaagcagacggcgcttatttcctggagctttatcatggaagcaccattgctttcaaggacatggctctttccatccttcctcatcttatgactacagctgcaaagaagaaccatgcagacaaggagatcgtgatcttaactgctacctccggcgataccggaaaagcagctatggcaggttttgctgatgttcctggaacacgcattatcgtattttatccaaagggcggtgtcagcaaggtccaggagctgcagatgcgcacccagaaaggtgacaataccagcgtagttgctatccacggaaactttgatgatgcgcagaccggcgtaaagaagctgttcggtaacaaagaacttgaaaaggaaatggcagaggctggcttccagttctcttccgcaaactctattaacatcggacgtctggttccacaggtagtttattatgtatacgcatacgcaaaacttctggaaaatgagcagatcgaaaatggcgaggagatcaacgttgtagttccaaccggaaactttggaaacatccttgcagcctactttgcaaagcatatgggtgtgccgatcaagaccctgatctgtgcttccaatgacaataaagttctttatgacttctttaccacaggaacctatgacagaaagagagaatttattttaactaattctccttccatggacatcctgatctccagtaacttagagcgtctgatctacttaagcacaggctgtgacgcagcagcagatgcagctttaatgaaagatctgtctgaaaagggaagttatactgtaactgagaatatgcgccagttcatgtctgatttcagaggcggttttgcaactgaggcacagaacgaggcgaccatccgtaagatctttgaagataccggatatcttattgatacccatacaggtgttgctgctactgtttacaacgcatacaaggcagaaacaggagaccagaccaagacagtgatcgcatccactgcaagcccatacaagttctctcacagcgttttagaagctattaaaggtaagtctgctgtagaaggaaaggatgaattcgcagtagtagatgagctgtctgaagtatccggcacacaggttccaaaggcagtagaagaactgcgcagcgcagtgatccgccacaatacagaatgtgatgtggataaaatgggtgaaactgtaaagaatatccttggaatcgcttaaaacagcttccattttaggacaagatagagtataatgaattagtacgttaagaatataacaaagttatatatttaacaaagacaggtgtccggaaaatccgggacacagtgcaaaaattgcagtatgttcaaggaggaataaaaatgttagtatcagcaaaagaaatgcttgaaaaagccagagcaggcaaatacgcagtaggacagtttaatatcaacaaccttgagtggaccaaatccatccttttaacagcacaggaattaaattcccctgttatcctgggtgtatctgagggcgcaggaaaatacatgaccggtttcaagaccgtagcagctatggtatccgctatgatcgatgaactgaatatcaccattcctgttgcactgcatctggatcatggtacttatgagggctgctataagtgtatcaaagcaggattttcctccattatgtttgacggttcccattatccgatcgaagaaaacatcgaaaagaccaaggaactggtaaagatcgcacatgctatgggtctgtccttagaggctgaggttggctccattggcggcgaagaagacggcgtagtaggtatgggtgagtgcgcagatcctaaggagtgcaaggcaatcgcagacctgggtatcgatttcctggcagcaggtatcggcaacatccatggaaaatatccggctaactggcagggattaaactttgaagttctggaaaatgttaagaaagaagttggcgatatgccattagttcttcacggcggtaccggaatcccggctgacatgatcaaaaaagctatcagccttggcgttgctaagatcaatgtaaatactgagtgccagctgtcctttgcagcagcaaccagagagtacatcgaagcaggaaaagacttacagggcaagggctttgacccaagaaaactgttagcaccaggcgcagaagctatcaaggctactgtaaaagaaaaaatggaactgtttggctccgttggcaaagcctgaaaataaagcaggtatcacaaaataagttagtacaatacaaaatctttttttaaaaaaccacttgcaattttaaaagaaatggtttattttaagaaagaacgaaggcgttctctatatcaggagagcgccttttttactacctgatgctttaaacttaaaaaaattaggttttcaggtaaagatagtaagggatgtactgcaaatagctgaagaaaagcatctcgaatgaggatttatggaaatcataaaaaaatgatgcaagagaggatggagaatctatgagcgaagtagtaagtgtttcagagatgtttggcaaggacgtatttaatgacgcagtcatgaaagaccgcctgccaaagagtgtgtacaaaaaactgaaaaagaccatcgaagatggagctgagttggatccaagtattgcagacgttgtggcacatgccatgaaggattgggccattgaacatggtgcaacccattttacccactggttccagccattgaccggagtaactgctgagaaacatgactcctttatttcagcaccggtagacggaaaagtgatcatggaattctccggaaaggaactgatcaagggcgagcctgatgcatcttccttcccatccggtggtttaagagcaactttcgaggcaagaggttatacagtatgggattgtacttccccagccttcttaaaagaagatgctatcggtgttaccctttgcattcctacttctttctgctcctataagggcgaggcactggataagaagacaccacttcttcgttctatgcaggcagtaaacgagcaggcactgcgtatccttcgtcttttcggaaataccactgcaaagcgcgtagttccttctgtaggacctgagcaggagtatttcattgtagaccgcgcaaaatatttacagcgtaaagacctgatctacaccggccgtactcttttcggggcaatgcctccaaagggacaggaaatggatgaccattacttcggtgttatccgtgagcgtatcggttcctacatgaacgacttaaataaggaactttggaaattaggtgttcctgcaaaaacacagcataacgaagtagctcctgcacagcatgagctggcaccgatctatgaaggtgtaaatcagtctgtagaccataaccagatcgttatggagaccatgaagaaagtggcagagcgccacgggttggcatgccttcttcacgagaagccatttgcaggtgtcaatggttccggtaaacataacaactggtccctgacagcagatgacggtaccaacctgatgaacccgggagatacacctcatgagaacatccagttcctgttagttctggcatgcatcatcaaggcagtagatatccacgcagacctgttaagagaatctgcttccaatgtaggaaatgatcacagactgggagcaaacgaggcaccgccagcaatcatctccatcttcttaggcgagcagctggaagatgttatcgatcagctttgtgatactggtgaggcaactcactccaagcagggcggaaccttaaaaacaggtgttgatatccttcctgactttgataaagacgcaaccgacagaaacagaacctccccatttgcatttacaggaaacaagttcgagttccgtatggtaggttcttccgactctattgcatctgcaaatacagtattaaataccattatcgctgaagccttcaaggaagcagctgacaagctggagaaggcagataactttgatatggctgtacatgacatgatcaaggaaaccctggcagctcacaagagagttgtattcaatggaaatggttattccgatgagtgggtagcagaagctgagagaagaggacttccaaacatcaagtctatggtagatgctattccggcactgatcacagacaaggctgtaaagctgtttgaagaattcggcgtatttacaaagaccgagctggagtccagagtagaagttgagtatgaaggctatgcaaaggctatcaacatcgaagcaaagaccatgatcgatatggctggaaagcagatcatcccggctgttatcaaatacacaactgctcttgcagcttccatctccgcagtaaagagtgcttgccctgaagcagatgtaagcacccagacagagcttctgttagaaacctctgatcttctggcagaaaccaaactggctcttgcaaaactgaccgaaattactgaaaagagcgcagcaatggatggcggcaaggaccaggcagttgcttaccatgaggaagtcgttcctgcaatggcagcattaagaaccccggtagacaaactggaaatgctggtagacaaagacttatggccaatgccgagctacggcgatctgatctttgaggtttaataaatcttataaaatagaaggttccgcctgcgtcagcaggcagataagcgcgagagtgcggtgaacctgagtattggacgcaattacataaataaaatgcccttctggtgatatataacgtatcccggaagggtgtttttttcgcggtatgagtggcattgtttaacttgcattttaaacccagtgtgctataatgttcatatatttttgaaaaataataaaaatgaacataaatataaacataagcataagcaggaaaaggagttaaagatcatatgaaccgacaggcgctggtatgcagaaatatactggaaaaaccggatattacacagcgggaaatggcgaaaaacatggacatatccctgggtacagtcaatgggctggtgaaggaatgtctggcagagggatatattgcagaggaagaaaatgggaaagaaaaatatctcatccttctggaaaagggaaaagaactgttaaagccttataaagtagatggggcgctgatcattgcagccggtttcggttcccgttttgtgcctcttaccttcgagactccaaagggtcttttagaggtctttggagagcgcatgatcgagcgtcagatcaaacagctccatgaagtggggatccacgacattaccattgcagtaggctatttaaaagaaaaatttgaatacctgatcgataaatacgatgtgaaattattatacaatccggaatactcctgcaaaaacacgctggctactgtatacagagccagaaagttcttaaaaggccggaacgtatacattctttcatcagataactggatgcgggaaaatatgtaccattcctatgagtgcggtgcctggtacagcgcagcccacgaagaaggagagaccaaggaatggtgccttacctttaataaaaagggccgtatcagcgatgtaaatgtaggcggaaaagatgcgtggtttatgtacggtcccgtatatctttccagggagttttccgctaaattccttcctgtattagaggcttattatcagatccccggaacagagcagttttactgggagcagccttatgtggacatgttaaagggagaggcaaaacgccgtctggaaaaagaggacaaggagctgttgaaacagacagaagaagcctgcggcatacctgcgtccaaatggaacgagatcgagatgaatatcaaccgccagccggataaccaggtatacgaatttgaaaatctggaagagctgcgcctctttgatacccattatcagaaccactccgataatgcggccatggagctggtagcagaggtattccatgtgccggagtttcagatcacagacatcaaatgcttaaaatccggcatgaccaataaatccttcctgttccgcaccggagatcatcactgtatctgccgtatccccggacctggcacagagcttcttattaacagagagcaggaaaaagaagtttatgatgccgtccgtcctctgggcattacagaacatgtgttgtatctgaacccgaagaccggttataagatctctgaatactatgaaaatacccacaatgccagcgcagacaactgggacgatatgaagacctgtatggatatggtgcgaaagcttcatgaagcaggtttaaaagtaggccacagctttaatatcagggagcggatcagcttttacgagaaactttgcctggaacatggcggcattccttttgaagactacagtcaggttcgtgaatgggtaaatcagttgttagatgccttagataaaatggatcttccacaatgtttatgccatattgacgcaaatgtggataactttttaattttcccggatcacagtgcaaaacttcttgactgggagtacgcaggcatgtgcgacccgttaatggacgtatccatgtgtgcgatttattcctattatgaggaagagcagaccgaaaaattactggaactgtatttacagcgcagaccagatgacaaagagcggttcatcacctatgcagacgcagccttagggggcttcctctggtgcctgtgggctgtatacaaggcaagtctgggagatgagtttggagagtacaccattattatgtaccggtatgcgaagcggtactataagaagctgatgaaggagttaccacagttcttttagaaacgccccatgatatgggaacatacacaaatgcatttcaaaacaggtttcagaaaattgtaataaaaatgttaatcatggaaagttcatttgtgctatacttaattaaaagtgaaaaataattgtgcgatcaatgaaaaagagacgatacaacagaacaggaggagaaaatgggacgtaaaaaatatttcgcagcccttgcagcagctggtatgatcggcgctatggcgttgggatctgcgtttaattcatacgccgcagatggatggaccaagtcaaatgaccattggacctacatctaccagggcaagacctatacaggttggctggaaaccagtgatggcaaatattatatggacctttccgatggacatatgactaccggatttaaacagatcgatggaaaatggtacttcttccgtccaaacggtctgatggctcaaagccgctggatcaatccggaatatggcaaatggtactacttcttaggtgacggtaccatggttaccggctggttaaagatcggaaacgattattactttatgcgtggtgacggatctatgggaaccggctggcgtcagatggacggtgcctggtactacttccagagcagcggcaaatgtgtagttaattcctgggcacagatcaaggacaactggtatctgtttggaacagacggaaagatgatgaccggctgggcaaaagttgacaccgactactattatctgaatacagatgggcgtatgcttacaggctggctcactgacagcgaaggcaataagtattatatgaatcagagcaatggcaagatgagtgtaggctggaagcagatcgataatgcctggtattatttcaataccaatggtcacatgatgacaggctggatccaggtagataataagatctactacatgaatccgacaaacggcggaaagatgacaacaggaacctccctggatatcaacggaactacctacaactttgatggaagtggtgtatgccagaatgcaagcggcgtatctgctcagacaccatctagcagcagtacttctgcttccggtggtgtaaccggtgaaaatggcggacctggtgtatcaagaaattccagctccaacaatggtccttccggtggtaacacttcaaataatacatcaaacagtccttccaataccacatccagttctgacaccttaacggcaggacgcacagacggaccaggctgatagaaaacttttaaattgcagactacataatggggatgtcaggaaaaagacatcccctttttcaggagaacaggcatgaataacgcagataagatcataaaacgatgccgggcgctggcactggcaggtatgattgggatcaccagtcttggaagttctcttccagcctttgctgcaggtccgggggatgactcatcccgggtatcagagatttccacaggaggtcctggagatccgggaaatactaattcttccaattctacaacaaacacaggaaattcaaataattcaaatagtaacaataatactaataacagcaataatacaaacaatacaaacaattccaatacatcatccaacaatactaccacaaataccaatgcctggaaaaaggtaaacggtacgtaccagatgtcagatggaagcgcgatccagaatgtgctccatcgtggtattgatgtttccagatggcagggagagatcaactggagccaggtggcaaaggatgatatttcatttgttatgctgggaacccgttccaagggagcagtagatccctatttccacaagaatatccagaacgcaactgccaatggtgttaaagtaggcgtttatatttattctctggcaactaccacagacatggcagtccaggaggcagattttgtattaaacctgatcaccgactatccgatctcctatccggtagcatttgatatggaagactctactcagggaaatctgtcaaaatcagagctggcggctattgcaaacgctttctgcaagcggatttctgcagccggttattacccgatcatctatgcaaatgagaactggctgaacaataaactggatatgagccagatgaattatccagtatgggtggcaagatattctgcccgatatacctggcaaaatccggtgatgtggcaggctacaagcagcggttctgtaaaaggtatcaatggcaacgtggatattgacttccagtttaaggactttacctctgtgatcccggcaaacacctggcgcaccattaacggaaagcgttattattacgcaaattacgaaaaacagaaaaatgcatgggcacaggatgtaaatgactggtactacatggataaagacggacttgcatctaccggctggatcacagtagcagatgcccgttattatctggatactactaccggaaaaatgcagactggctggcagtcagaaaacggaaaatggtactaccttggaagcagcggtgctgtaaagaaaggctggatcagtgataatggtacctggtactatactggcaatgacggtgctatgcagacaggctggatcgaagttagcggcaaacgctactatctggaaaattctgggaaaatggttactggctggacgaaccagaacggcaaatggtattaccttggcagttccggagatctgttaaaaggctggatcaatgatggtggcacctggtattattccaacaacgaaggtgtgatgcagactggatggctgacagatgcaggtggaaaatattatctgagaggctccggtgccatggcaattggctggagacagttagatggtgcatggtattactttaacagtgatggcaggatggcaacaggaatgatcgaggtaggcgggcttcgttattatatggatccttccgacggtcgtatggtatctggcagagcagtagaaataaatggcgtcacctatcaggcagccgcagatggacatttaagccagcagggtcaggaaacaacaggggaccagagcagccagaattccggaaataatgcttcaggcagcaatacaggaaataataacacaggaaacaacgttcagatcactcctgcaaactctaccacaggttcctctgacaacagtacttccaactcctcttctgatgatcagaaagtaacaggcgtaaatggaggcccgggagtaaagaaggactctgcaaataatggaaacaatgataaggtagtaacaggtcaggcaccaggctgatgaaataactatttaaatccgcttttggcagaatgggaaatctgcttcaaaggcggatttttttgcgtattcccgcataaaataaacagataccattcatcaggtgaaccgtgcataacaggtatataaaatatttcgtctttcttctgtttacagcagatctggtcttatccgctattttcctgaaaaatgatcacagggatatagaaaaaatattttcacttcctgcactttcaaaagttgccggccagcccgggtatatagccctcacttttgatgatggtccggaccggaaatgtaccccgcttcttttagacggactgaaagaacggggagtccatgctaccttttttcttatgggaagcaatatagaaggaaaagaagatattgtaaagcgtatgagcgaagaaggacatcttattggcaatcacagttatgaacatatccagctgacaaaagcgggagcggaggcagtctgtgaagcagtagaacatacccaggaacagatcgaagccattaccggaaagcgcccggaatatatacgtccgccctatggtgactggaacgaagaactggaagaagagattggaatgagcccggtcctctggtctgtagactctttagactggaaactaaaagataaaggaaagatcgtccggcgggtcttgaaagatgtaaaagatggggatattatattaatgcatgatatatttccttcctctgtagaggcagccctggagctgatcgatatactgcagaaggaaggttatgtttttgtaacggctgatgaattgttgatcgaatgagatcaaaagaaaaatggagaaattaaatggatctatttgattatatgagagaaaatacgatggagaaggagtctcctctggcttccagacttcgtccgcgcacactggatgaggtagtggggcagcagcatatcattggaaaagataagctgctctaccgggcgatcaaggcggataaactgggatctgtgatcttctatggacctccgggaacaggaaagaccacccttgccaaggtgatcgcaaacaccactcaggcagattttaagcagatcaatgccactgtggcgggtaaaaaagacatggaagaagtggtcacagaggcaaaaaacaatatgggaatgtatggacggcggaccattctttttgtagatgagatccaccgttttaataagggccagcaggattatcttcttccttttgtagaagacggtacactgacactgatcggtgctactacggaaaatccttattttgaggtaaacggggcgcttctttccagatcccgtatttttgagttaaagccactggagaaagatgacattaaacagctgatctaccgggcggtaaccgactcagaacgtggaatgggaacttaccgggtaaagatcgaggaagatgccgcagattttctggcagatacagccaatggggacgccagagcagccttaaatgcagtagaactgggagttctcactacagaacgcagcgaagacggattgatacatattgaccttgctgctgcccaggaatgtatccagaaacgggccgtgcgttatgacaaagatggggacaaccattacgataccatctctgcttttattaaaagtatgcggggatctgacccggatgcggccgtgtattatctggcacgtatgctgtatgcaggagaagatattaaatttattgcccgccgtattatgatctgtgcttctgaagacgttggaaatgcagacccacaggcgttaaatgtagcagtaagcgcagctcttgcagcagagcgaattggacttccggaagctcagatcatcctttcccaggcagcttcctatgtggcatgtgcccctaaaagcaatgcagcctatgttgccatacagaatgccatggaaaatgtaaagaccacccgtaccatgccggtgccggtacatcttcaggaccgtcattacaaaggtgcagcgaaattaggacatggtgaaggctataaatatgcccatgattacccgaaacattatgttaagcagcagtatcttccagatggaatggagggtacagtattctatgaaccatcagataatggctatgaaaagcagataaaagcccatatgaaatggttgaaagattaacaatggcaatgtataataaaaaatgataaaaataattttacgtggatcccaaggcagaaattctcactctgcctgtcggatctgtctataaaaggaacttcccaaaatctggaaaaatcccgtattttacaaagacaggcaaactgaataattcagataacagatgcataatagataggagagtagtatgcgcgaaaaattagagacaaggtcccttgccgaactgaaagagatggcaaaaaatgtgggactgaaagggatcagcggccttcgtaaggcagagcttattgaccttttatgtgcccaggaagagaaaagtcagaaaaacacagcagaaacagtaacagtgaaacctcacagcagccgtgtaaatgctgagaaaacagtgcgggagaaaccagtccaggaaacccgcagtcaggagacccgcccacaggagaaccgggtgcaggaaagtcgtgtgcaggaaaatcgcagccaggaaaaccgtgtgcaggagacccgcccacaggaaaacagatatcaggaaaagcgttcccaggacaaccggaataatcagagaaataaccgtacatacgaaagatttaaccagacccgtccgcagatccgtacatatgggaacaacaattataacaataacaacaatagttacagcactccggcagctgcccctgttcagcaggcggttcccgtcagccagacttattctacccagaaccagacttatgtccagaatgtggacaaccaggagcgtgtggcaagaccggaatacagaaatgacgccatgggactttccacacaggatatggcagaattagacagcggcattgaggcaaacggtatcttagaggttatgccggacggtttcggctttatccgctgtgaaaacttccttccaggtgaaaatgatgtctatgttgcaccatcccagatccgccgtttcaacttaaagaccggtgatatcattgtgggaaacagaagagtaaaagcagctacagaaaaattcgctgcacttctctatattaaaacagtgaacggctatccattaagtgctactgagacaagaccaaactttgaggatctgaccccgatcttcccaaatcagcgtctccacatggaaaatccaagagagaaaacttctgttgccatgcgagtattagacctgctggcacccatcggtaaaggacagcgtggtatgatcgtttccccgccaaaagctggtaagaccactctcttaaaacaggtggcaaaagctattaccaccaatcatccggacatgcatctgatgatccttttgatcgatgagcgtcctgaggaagtaactgacatcaaagaagccattgtagggccaaatgtagaagttatctattccacctttgatgagcttccggagcgccacaaacgtgtatctgaaatggttattgaacgtgcaaaacgtctggtagaacatggaagagatgttatcatccttttagacagtatcacccgtctggcaagagcttacaatctgaccgttgccccaagcggccgtaccctttccggtggtcttgatccggcagcactgcatatgccaaagcgtttcttcggtgctgcaagaaatatgcgtgaaaagggcagtctgaccattcttgcaacagcattggtagatacaggaagccgtatggatgatgtggtttacgaggaatttaagggtaccggcaacatggaactggtgctggaccgtaaactgtctgaaaaacgtatcttcccggctattgacattttaaaatccggtaccagaagagatgatctgctccttacaaaagaagaggcagaggcagtagatattatccgcaaagccaccaattccttaaagccggatgaggcagtagagaagatcttagatctcttttcaaagaccagaaataaccgtgaatttgtagagatggtaaagaagattcgcttcttctaagacttcctttttctgacatgatatagtataattaaaagcatgaatcagggggctgtcaaaagaccttttgactccaaaatttaatttaggagggagtatgttataatgaaagattacatgaagatataccaggaatggttatcaaatccttactttgatgaggctacaaaggaagaactgcgcgccattgagggcaatgaaaacgagatcaaagagcgtttctatatggaccttgagttcggaaccgctggtttaagaggtatcatcggcgcaggtatcaaccgtatgaatatttacgttgtaagacgtgctacccagggacttgcaaattatattatcaagcagggagcagctaacaagggcgtagcaattgcatacgactcccgtcatatgtcacctgaatttgctatggaagcagctatgactttagcagcaaacggtatcaaggcatataagtttgaatcccttcgtccaacaccggaattgtcctttgcagtacgtgagttgggctgcgtagcaggtatcaatatcactgcaagccacaacccgccggaatacaatggttacaaggtatactgggaagatggcgcacagtttacacctcctcatgataaaggtgttacagaagaagttctggcaatcgaagatctgtctacagtaaagactacagatgaggcttctgcaacagcagcaggtctgtatcaggtaattggacaggagattgatgataaatacatcgctcaggtaaaggctcaggtagtaaaccagaaggccattgatgagatgcaggatcagatcactatcgtatacacacctcttcacggaacaggaaatatccctgcaagaagagttatgaaagagatcggatttacccatgtatacgtagttccggagcaggaactgccaaatggcgatttcccaactgtaagctatccaaacccggaagcaaaagaagcatttgaactgggcttaaagctggcaaaagagaaagatgcagacctggtactggcaactgacccggatgcagaccgtcttggtgtatatgtaaaagataccaagtccggcgaatatattccactgactggaaatatgtccggatcccttctgtgtgagtacgtactcagccagaagcaggcagctggaaagatcccggcagacggacaggttgttaaatccatcgtttccaccaacctgatcgatgcagtagcaaaatcatacggcgcagaactgatcgaggttctgaccggatttaagtggatcggaaagcagatcttaaagaatgagactaccggacatggtacataccttttcggaatggaagagagctatggatgcctgatcggaacctatgcccgtgataaggacgctatttccgcaacagccgctctctgcgaggcagctgcatactacaagcagaaaggcatgaccttatgggatgcaatgatcgctatgtatgagaaatacggctactataaagatgctgtaaaggcaatcggtttatccggtattgaaggacttgcaaagatccagtccattatggagacactgagaaataatactccaaccgaagttggcggctacaaagtaacctccgcaagagactacaagttagacaccatcaaaaatatggcaaccggcgaagtaaagcctaccggacttccttcttccaacgttctctactatgacctggaagacggcgcatggatctgcgtaagaccatccggcaccgaaccaaagatcaaattctacttcggcgtaaagggaacttccctgaaagacgcagaagagaaagagaatgcacttggcgcagctgtaatggctatggttgataagatgatgtaatgagtccaaaagaaatcttcgaatgcgtcacaggcgcattctcgatatgcatggcaaaacaagcggctgcgaagcagacatttgtttttcttggaccattaacgaatgaaccgtctgcgtaagcagacagtagagcgcgtcagcgcggggttcatgagtggatacctggcaaacgtaaacacccctgggaaagaaaatttcaatcccaggggtgtttttatgtttgctctgccaagacatctccccgccatcggcgggaagataatacccagcatatatccccgcatcagcggggacataaacgcttactatttatttctcttctcagccgcttccctcaattccttcaaagccgctgcaaacttcatagaagatgcagatggatttccacgtaaaatacttctgcggtagaaattcatatgtttcatcatatcctgacgtttctttgttaattccgtcatacggctgctcattgctgcgatacgttcattacggctggcagtcatagcagcttttacattcttggcagcttcgatctttgcagccgcctcttcacggtactgagctgctttctcatctgcatgttcctttaactgagccgcttttaatgcagtctcaagccgcagttttgccgcccgctccgttgtctcatattttaactgggctgcacgttctgcagtttcatttcgcagctgcgcagctttaccggctgcttccacacgcaaagtttccagcttcacagccgtatcttcctttgcttcttccagtttctgttctgtttctgccttcaataatgccagctgaacctgaacatcgtccagttctgccttcatctttgtcatggcatcaagcaccctggcaagatccagggcagtacgtacagattctgcagtatcaataatgaaaaccactgtgatcacagacaaacatgggatgccgatcatagttggaacatgaagcacccatcgttcaatgggcttgtggatcacctcagtaagaaaaatcgtcaaaaatccccatgcaacagaagaggacagacagatatatccgtttaaattaaaacgctggttgctgtaatcccagtatttcattttaaacagccgctccattccccaacccgtcacatattccaggatcgtagcaccgattacaccggagatgtaaaccatgaccagactgctcttaaatggaagagatacccataacatcatcacagctcccgtaccataaagaggcagcatgggaagtcgcagaaagccgcggtttacaaaacggtgctgtttcaaagatacataggtagactcaaagatccatccgaaaaagcaatatatatagaagaaactcagccattgataccaggtgtattcgtacataggttgtccatcctttgttttaatgatatgataccagggtcaaaaggccggaaatccgacgcaagcttgcttgcaggaggatttttgaacttgggacccgccaaaaacatgagtaaggagccattttttgaagaaaaatgagcggattacgaatcaacatcatgatatgagtataccatatttcttttacctgtactaccacttcactacccggtcgatcaatttttgctgctcttctgaagaccgggtcagatagatccgcgtagtctcaatactttcatgtcccatcagatctgccagcagggaaatatcattaaacttctccagaaaattctttgcaaaccggtgcctgaaagagtgaggataaacctgtttagaagggatcttataccgttttgccagtacctttaactgggaacggatacctctggcagtgatcacctgtccatttctccctgtaaaaatataaccggaaacgatgtcacgccttttcagccatatttccgcttcctcacaaagagcagcaggaaaataaatacgcctcattttaccgccttttgagtacagatccatcatccccagttttacatgctccgcctttattttcaaaagttcgctgacccgcattcccgttgctcctaaaaaacgtactacaaaataccagaaccagttttcatccttcttcagcttcttttttagtatctcatagtttcttttagatattacattgtcaataaaagtcttctgctggtattttacggcaggaagtttaaaggatgaaatttccatatattgtaaatattggttcatgccatggatatgtacatttacagtagcaggacggtaatgttctaaaagccatgctttatgagcctgaaggttttcagggtcaatggtatcagaatgggagaaaaagtggcggacagccagaagataaatacggatcgtattatcagaagctcctttgcggagcaggaaatccttaaaaggggtcagttccaggtcgttggatagtgtattttcagatccgttttctttaaacctggtattatctgagggaaaaataaatgtagtttccatacaatacaccccctgcagctaccagtttacaacctgattaacaatacggtactgttcccggctgctgcgccgcaggtagatccgggtggtttcaatgctgtcatgtcctaaaagatccgataacagggcaatatccggacacacttcaataaaattctttgcaaaccggtgcctgaaagaatgaggatacataacatccgggtcaatgtcgtaccttgctgcaaaaacctttaactggaaacggatcccggaagcagataagggagctccaaaccggtttaaaaataagatcccatccggacgctgggaaaacccgggccattcctcaaatgcctttcgcaaaacagccggaatgtaaaccctgcgcagcttattccctttagaataaatatcccggtatcccttttttacatcttcaacatcaaacaataccaattcgctgatacgcaccccggtagcagccataagccgtataagaaaataataattatattccccatcttcccataagcgctgctttaaaaactcataatctgcctgactgatgatctgttccaaaaatcctttctgctgcacatgtaccatagagaccggacacagggagctttccctgtaacgtacaaaacagttcatggcacgaagccgcagattgacggtctgtggtttataacgttcaatgagaaatactttataaagctgcagatttttatccgtcagctgggaatacagcccgtaaaactgcttcaaagcataacaataagcggtgatcgtccgttccgacatatttcgttccaataaatatttacgaaattgtgtttgtgcccgtttccctgaaattcccgcactattacctgtagttgtcatctgttctttcattaaaatatcctccttaagtgaaataatgtcctctcggagtctttcctgcacctgcctttgtggccggttttccgccagtcgcacccggatttcatcaccgtacgcaccgcgtacgcctcagaaatgtgggcataactgacaaaaaatcttctcacaaaaccaggcacagaaagattccgggagaacataaatatattcatgcagaaaacctacattacaatcttagtacatcgttttcaaaataactataccactcacttgtctgcggatctgctcacacaggtctaaaagcctcagtgtatctcgctgttcttcagtagattttgtcaggtggatccgcgaggtttcaatgctttcatgtctaattagattagtagacagttgggaaaattgaggattttcttgacataattctcccctcactatataatgataatatcagacagacaacagtgtgtgtttgtccagacgttgaaggatagcagcgtaccggaaagccttgctatacggagtctttaaaaggggttgtgcagtgaaacctcaaaccggagtaggtcaatgaaccgaatgaaaatgctcaaaaccgtcttgtttatacagggcggttttcttttatacataaggagggggatgaaaaatggatcatttattagaatgtgcggaagcttttgaacagttattggatgttcagtaccatattgttttaggacgtaaaaatcgattaacagaattaaccctccgctttgatccaacagagtttcatcatttagttggactacataaattgcgagatctccgtctggcaagagggaatcgtgagaagatattttatcaaatactttcaaaaacgatttgcatggaagatatcaaaaagagccgttattttccggaaatacaagatcgtatgttcttctttgataaaatagagtatcttttagacagcaataaaacagtttttctgcaggtcctttttccaaaaaggagagaaggattacacaaaaggacaagcagtttatacattactaaaaaaagaaataacaatagttagtactggaaaaacagtagtacagtatgatcggctaatgttaagatgttggggtcaaaaggtattttgacccctctgataccgaattgctacgtgctttgcactctcgcaattctaaaaacattcgtaatccgctcatttttcttcaaaaaatggctccttactcatgttttgggcgggtcccaagttcaaaaatcctcctgcaagcaagcttgcatcggatttatgaccttttgaccctggtatcatgttaagaaaaacataaaaaaatccccgctctgcttacacagaacgggtcatcgcatttttagaggggtatgaaattatttaggggggccggacggattcctccgtccggtatgagtatgaaaaagctttgtgatttcaagtaaccacttgaaacaaaggccttgtccacctctcggtgaacgatattataatacggaataaatgtgtccaaaaaatgtacataatataaaaaaagaataaagaatataaataagtgaaaaaaacctttgaaaacttttcaagattgtatataatagaagaaacttcagtctgctctgaggcgtacttgtcatgcttaaagcgcaggccctttttttgagttatacaagaaactactattgtaagaaactttttgtgaccccacattttaggaggaaatatttatatgttttcaatgatgtccaatgacattggaattgacttaggaactgccagtatccttgtgtatatcaagggaaaaggcgttgtattaaaagaaccgtccgtagttgccattgaccgtgataccaataagatcatggcgatcggtgaagaggcacgcctgatgatcggacgtactccaggtaatatcgtagcagtccgtcctcttcgtcagggcgttatctccgactataccattaccgaaaaaatgatgaaatactttatcaacaaggcagtaggcaagagaacactgcgtaagccacgtatcagtgtatgtatcccaagtggcgctacagaagtagagaagaaagcagtagaagatgcaacttaccaggctggtgcccgtgaagttgctattatcgaagagccagtagcagcagccatcggcgcaggtattgatatcggtaaagcatgcggaaacatgatcgtagatatcggtggtggtactgcagatatcgcagttatctccttaggcggacctgtagtcagcacttccatcaagatcgcaggtgatgacttcgatgaagcattagtccgttatatgagaaagaaacacaatcttcttatcggtgaacgtactgcagaggagatcaagatcaatatcggtgctgcataccgcagaccggaagtacagactatggaagtaagaggacgtaacctggtaaccggtcttccaaagaccattgtagttacttccgacgaaactctggaagcattaagagaaccggctctccagattgtagatgctgtacacaatgttctggagagaacaccaccagaactggcagccgatatttttgaccgtggtatcgtaatgaccggcggtggctcccttctcagtggtctggatgccctgatcgaggaaaagaccggcattaccaccgtgatcgcggaagatccgctgacagctgtagcgatcggtaccggtaagttcattgaattcgcacacggtatgacctccgccctggaagcatccatgggaattggcggcggaagaaacgataaagaggattattaatttttttgactggccgggctgccgcagcaatgcggcggcctttttgactatataaaagcagcaactgttcttatacacagatacagaggaaagaaaaatggcaaccataacaggatttattgaaaaaataaaattcagaaacgaggaaaatggctatactgtgctgtcagttaccgaccagagcgatggtgatgaagttatcatggtaggtacgctttcttatgctgctgaaggagacatgatccaggcctccggacgcatgatcgagcatccggtatatggagaacagcttcagatcgaaagttacgaaatgaaaacgccccaggacgcagagtctatggagcgctatttaggttccggtgccatcaaaggtatcggtgtagcactggcagcccggattgtccgccatttcaaagccgacactttccgggtcatggaagaagaaccggagcgcctttccgaagtgaaaggcatcagtgaaaaaatggcaatggccattgctgaacaggtagaagagaaaaaaggcatgcgggaagccatgatgtttctgcaaaattatggcattactttaaatcttgcggctaagatctaccaggaatatggcccgaagctgtacagtatcatcaaagaaaatccctataagctggcagatgatattccaggtgtgggatttaaaatggcagacgagatcgccgaaaaagtaggcatcttcacagactccgactaccgtatcagggcaggtctcctttacattcttctccaggcatcagccaacggccatacctatcttcctcagaaagaattattttcccaggcggcagaactgttaaaggtagagacgactgctatggaaaagcatctgatggatatgcagatcgaccgcaaagtagtggtaaaaacagtcccaggcagcgaaccgccggaatatctggtctattcttctcactactattatctggaactgaacacggcccgtatgctccatgacttaaacatccgtggcgatataccggaaacagagatccgtgccaacctggcgaaagtccagaaaaaagaagagatccatttagatgaattacaggaaaaagcagtttttgaggcagtaaacagcggacttttagtgatcaccggcggtcccggtacaggaaagactaccaccatcaacgccattatccagtattttgaaaatgagggaatggagatcctactggcagcgccaaccggccgcgcagccaagcgaatgactgagactaccggttatgaggcccgtaccattcaccgcatgctggaactggtgccatccggtatcccggactctggttctatgtctgggaataatgccccttccggtaaaaatggctctttcagttccggtggcatgcattttgaccgaaatgaagaaaatccgctggatgccgatgttattatcatcgatgaaatgtccatggtagatatcagtctgatgcattccctgttacgcgcagtaaacgtaggaacacgtctgatactggtaggcgatgtggaccagcttccaagtgtaggacctggaaatgtgcttcgcgacattatcgagtccggctgttttaatgtagtaaaactgacccacattttccgtcaggcggcccaaagcgatattattgtaaatgcccacaagatcaacgaaggggaacgggtagatctgacaaagcgcagtaaagactttctctttatccgcagggaaaatcctgatgcagtgatcagcgcagccattacactgatccagcagaaacttcccggttatgtccacgcccaacccggtgatatccaggtaatgacgcctatgcgaaaaggtgctctgggagtagaacgtctaaaccagattctgcaaaattacttaaacccaccggatccgtctaaaaaagagaaagagtccggcggtatcatctaccgcaccggggataaagtgatgcagatcaaaaataattaccagatggaatgggagattcgcagcaaatacggcattcccacagataaaggtgccggtgtatttaatggtgatatggggattatccgggagatcaatgaatatgcggaaaatcttaccgtggaatttgatgaagggaaaatggtagaatacagttttaaacagttagaagaactggaacttgcctatgccattaccatccacaagtcccagggaagtgaatatccggcggtgatcatccctatgtattccggcccacgtatgctgatgaccagaaatctgatctatacagcggtgacaagagcccgctcctgtgtctgcctggtcggccggccggatgcattttatactatggcagataactccatggagcagaaacgctattgcggcctgaaaacccgcatagaagaaatatacgcctgacaggcatctgtttacgaataaaatataatattctaaaatttctaataaatctaactctgtctataaggagaacgtatgaactatataatagaaacgatcctggatctgctgttcccgcgcaggtgcccggtttgcggtcagatcattatgccaaaaggaaatctgatctgccctgggtgtatcagaaaattgtcctgggtccgtggaccggtgtgtaaatgctgtggcaaggagatcataagcgagaccgcagaatactgttctgactgcgcaattcatccaagatctttttccaatgggatggcgctgcttaactataatgaaatttcagcaccgtccctggcaaagatcaagtatcacaaccatcgggaatatctggatttttatgcagaggctgcatatagaaagtatgctgccaggatcgcccgcttatcaccggatcttatcattccggtgccggtacacaaaagccgcatgaaaaaaagaggctttaatcaggcagaagaatttggaaaacgtctgtcccattatctggaaattccaatgaattccagtttgctgatccggtcaaaaaagacggtaccccagaaagatttaggacctgccctgcgccttaaaaatctggaacaggcatttagctgcagaaaactgccgtacagaatgaaaaaagttctccttattgatgatatttacacaactggaagtactgcagaagcctgctcaagggctttgaaaaaagccggagcagagcaggtttttcttcttgtgatcgccaccagctccaatcgataacaaaaatcttgtataaaatgataaaaatcattaaaaactatagaaaagaccttttatacctcttgacgtcaggaatatttttatgttatagtatacgggcgaatggaagataggtcttttttttatgcttaaaattaagaccgagaagcaaattgaattacgataatttaatggaggtggaagtcgtgcgcacaaaaatcacactggcatgtacagaatgcaagcagcgtaactacaacatgactaaggataagaaaactcatcctgaccgcatggagactaagaagtactgcagattctgcaagagacatacgttacacaaggaaacaaagtaatcctgatcagtaaaggacgtgaagttatggaagaaaatacagtgaatactgtagaaaccacggaaaaagcggccaagactgaccagaagacggctaagaaggagaaaaagcctagctttttcaaaggcctgaagacagagtacaagaagatcgtctttgctgataaggaaactgtagcaaaacagactgttgcagttgtagccatgtccgttttcatcggcgctctgatcggtgtactggatatgattatgaaattcggtttaagctttattctttaatttcaaaggcgagggtgattgtatgtcagaagcacattggtatgtagtccatacctactcaggttatgaaaacaaagtcaaggtcgacattgagaagacaattgaaaacagaaaccttcaggatcagatccttgaggtatccgtgcccatgcttcctgttgtagaactgaagaatggcgtggagaaaaaagccgacaagaaaatgtttccgggttatgtgctgatcaacatggtcatgaacgatgacacatggtacgtagtacgcaacacccgaggcgttacaggctttgttggtccgggctctaaaccagttcctctgacagaagaagaaatggcaagcctcggatttatgaaggaagacgtcttagtcgactttacattgggagatatggtaacagttatctccggtgcatggaaagatacagttggtgctattaaggcgatcaacgaaagtaaacagaccatcactatcaatgtagaaatgttcggtcgtgaaacaccggtcgaactgggatttgcagaagtaaagaaaatgtaaaatggatcagcttttgcgcagcagaagctggtgggagggacattcccgacaataccacataattttaggaggtgcctaagatggcaaagaaagtaacaggatatatcaaattacagattccagcaggcaaggctacaccagcaccaccagttggaccagctcttggtcagcacggtgtaaacatcgtacagtttaccaaagagttcaacgctagaacagcagaccagggagatatgatcatccctgtagttattaccgtatatgcggacagaagcttcagcttcatcaccaagaccccgccagcagcagttctgatcaagaaggcttgcggtttaaagagcggttcaggtgttcctaacaagactaaggtagctgtattaaagaaggctgacctgcagaagatcgcagagaccaagatgccagacttaaacgctgctagccttgaggctgctatgagcatggtagctggtactgcaagaagtatgggcgttaccatcgaagagtaattaataccgtatatatgaacgtgggagggagattcccccgtcaataccactaggaggttattttataatgaaaacaggaaaaagatatgcagaggctatgaagaacgtagaccgtgctgcactttacgacgtagcagatgcaatctctatcgttaagaagaacgcttctgcaaaatttgacgagactgtagaacttcatatcagaacaggatgtgacggacgtcacgctgatcagcagatccgtggagctgttgttcttcctcacggaacaggcaagactgttcgtatcttagtattcgctaagggtgcaaaggcagacgaggcacaggcagctggcgcagatttcgtaggcgctgaggaactgatcccaagaatccagaacgaaggatggctggatttcgacgttgttgttgctactcctgacatgatgggcgttgttggtcgtctgggtcgtgtacttggacctaagggcttaatgccaaacccaaaggctggtaccgtaaccatggacgtaaccaaggctatcaaggaaatcaaagctggtaagatcgagtacagacttgacaagacaaacattatccacgtgccagtaggaaaagcttccttcaccgaggagcagttagcggacaacttccagacgcttatggacgctatcttaaaggctaagccaagcaccgttaagggcgcatacttcaagagcgtagctcttacatccaccatgggcccaggcgttaagctgaacgtagctaagcttgcaaactaatcaggtgtcctgaatagaaaataaggctgcagagaattttggttctctgtggcctttttgctttcgtgttctcccgcccatggctggaggtgaaaaaagttaaaaaaatacaatttgttgcaaaaatctcttgacattcatgcacagatatgttattttattatgcgtgttgaatgccctgagacagcaggtaccgtaaggtgtaagcttaaaacgcctgccgaggaacatacaaagctctaatgagattttgcatacctctctgtcattgcggcagggaggttttttataagatcgtttccttgctatgacggttttcaatacgaaataatataaggaggtaaaccattcatggcaaaagttgaattaaagcagccagtagtagacgagatcaaggcaatgctggacggcgctgtaggtgcagttgttgttgattaccgtggtctgactgtagagcaggatacaaaactgcgtaaacagttaagagaagctggagtttcttataaggtatataagaacactctgatcaagcgtgcagcagaaggaaccgagttcgcagctctggatccacatctggaaggacctacagcattagctgtatctaaggatgatgctacagcaccagctagaattctggctgaattcgctaagaccgctcctaagctggaactgaaggcttctgtagttgaaggaacctactatgatcaggctggaacccaggttatcgcaaccattccatccagagaagttcttcttggaaagctgcttggaagcatccagtccccaatcaccaacctggctcgcgtactcaatcagatcgcagagaaaaatggtggtgcagcagaggcttaatctgcaaaatgaatttgtggctcttttatccgcatagtccggaaaaagcagcctgaaacacagatcctatcgaaaaataaattttaaacaggaggaaattaaaatggcaaagttaacaaccgctgagtttatcgaagctatcaaggaattatccgtattagaactgaacgatttagtaaaggcatgtgaggaagagtttggcgtatctgcagcagcaggcgttgtagttgcagcagcaggtgctggcgcagcagcagctgaagagaagaccgaattcgacgttgagctgaccgaagttggaccaaacaaggttaaggttatcaaggttgttcgtgaagctaccggtttaggcctgaaggaagctaaggacgtagttgatggcgcaccaaaggtattaaagcagggcgcatccaaggaagaagcaaacgatatcaaggcaaagttagaggcagaaggagcaaaggttaccctgaagtaatcaaagcttactgtacagacttatatttagatatgagcgcttttcagaacccacagtactgtgaaaacagactgtgggttctttttttcttttacacagttatttcaaaatagctgtttgtgatgtcatttaccttatattctttttatatttgtaagtacttccaaaagtacaataatatggttgcatatttcgaaaaaatagtatatattagttgaggctcgatgagctgataagtaaaaaagataaatataaaagtgtacaacatactattggaaaaagaccccaggccaaggagcaaacgactaatcataaggcagctcctctacctggggtctttttaggggaagagagtattttatatacgggaaaaaacatccggcgctgttgcgcatcgggtgttttttcttgttatgcgtatttataataggaagaaacaggttcggatccaggatgaagcctttaaggataaaacacgttacatgtacagatataaatacaaaaacagcataaaactgtacttttgtaataattacgtaagaaaaatcacaggtaaaagttatggctttttttcggaaattataatatactatgaactgtgatggagaggttattcatccgggacaaattatcaatattctccagaaaaaggagaaaatgcaaaaaatgcaaaaaaactattgataattttccttatcagaagtataatctactcgtaatgcaataaggaatttcaaaaagtatttcaaaaatcaaaggagagtgcattcattatgaagaagcagacaaaattagttgctgtattatcaacagcagcactgcttgctatcggtgcatctatgacatctttcgcagctacaggctgggcagaagaagatggaacatgggtatactatgatagaaacggtgacaaagtaacagataagtgggctaagtccggtaacaactggtattacttagacagcaacggtgagatggctgtagatcagctgatcgaagacggtgacaactactactatgttgacgtaaacggcgttatggcagctaaccagtgggtagctattgataacgaagatgctggcgatgatgatgagccagagcattactggtactacttccaggctaacggcaaggctttaaagcagggtgactctgataccgtttccttaaagactgtaaatggtaagaagtacgcattcgatgatgaaggcaagatgctgtacggttgggtttcttccgataacgctgagcgtatcgacaataccgatgatgacgcattcaaagatggcgtttactacttcggtggtgaagatgacggtgctatgactactggttggttactgatcgacgtttcttacgacgaagcaactaatgatgattacaagtacaccgctccaacattcaatgatgatgatgatcagactcgttggttctacttcaagtccaacggtaagaagctctatgctgataacggtgagagaaccaaagataaaactatcaacggtaagaagtacgcattcgatgagtacggtgcaatggtagctgagtggtctctggatgaagacgatgagaagaaggcttctgatactgaagcccaggaagcagcttctactgcaagcacctccgaagcttgggaaggcaacggcaagtatgctaagtatactcaggcatggaagtactacaacagcgtagaagacggttcccgtgtaagcaagggctggttcaaggttgttcctgctgaaatgctgaacaaagagaaatatgatgatgacgaagagtcctggtactatgcagatggttccggtaacctgtacgcaggtgaattcaagaccatcaaaggcaagaagtacgcattccgtaacgatggccgtatgttaaccggtcttaagttcatcaaagaaggcgatgaagacttcgctgacgttaaggctgatgatgatgatagcagaccattcgataacgaagacgatttctttgacaacgcaattgaattctatgagccaaacggttacaagtgctactacttcggtggcggcgatgacggtgctatgagaaccggaaagaccactatcaactatgatggtgagaatacaagcttctacttcgagaagtctggcggtaagaagggtgctggtgtaactggtgagaaagatgacaagctgtatcagtccggtatgctgttaaaggctgactccgatgacaagtacatcgttgttgataaggctaccaagactgttaatggcaagaccgttgttacctacgacaaattagatgatgctaaggacttcatggatcaggatgacgtagttgcaaccaatctgctggaaaacactactgctgatacccgtgtaaacatcggaaacaacagcaacaagaaagctgaagatctgactgaagcttataagatcagctttactcagtctgatgaagatgttaagcatgaatacgttcttgtaaatacttctggtaaggtaattgacagcaagggcaagaacaaagatggtaacgattactactatgtaaccgatagcaagggcgttatcaccaatgtatatgtagagaactaattatcaaatacatagtctctagtataactaaaaattaagggggaagcgttatagctgatgtaattatatattagctataacgcttttcttttataatcaaaaactgccaaggaggtaatcccatgttaaaaaaacatttattaactgtaggacttgctgtattgctggcaacgaccagctctgtacctatttttgcagaaacaacatccaccacttccacaacaaccacaatggaaaactgcggtgcttatttatttgagtggcgtcctattgattgtggaaacggtaattattttgctattcttgtaggtggaaatacacttcaggaaagcaacgtgattttaaaccgtggatatgattatgcctatacttttgatcctatgacttatcaacgtccctggggaacggttccagatctggtaaacgtggatgggaaatggggtatccctgaaaactggtcttctatgcctcaggatagtcagccagtaatgcagattgttttgaaaacaaactataaaacattaagtactgataagcgttatgttaatgtagttcatcttccttccaacatagactcatctactcttccatctgaagtacgtaaatatctgattaatgtagacggttccgatgcaggcgcctacaccgacactataactcctggttggcaggacctggaagatggcaccgttaaatatatgaaacctgacggcacttatgtatcaaatggctggctgcagttagatgataagaagtactatatggatgaaaatggtgtaaaattaaccgacacaattactccggatgggtattatgtaaatataaatggtgaaaaaacttcttatatgcctggttggtttaaagacggtgacaattggcgatacattctaaaaaatggatactatgctcaaaacggctggcttcaagatcctgcgacacagaaatactactattttaatatggctgctattatggaagcagatactactaccccagatggttattatgtaggagctgatggtgcctgggacggaaatgcatccacaaaaaatactactgaagaaaaaaatcttggacctggcgtagacaagggctgggagccagtagataccggctggaagttcaaacaggaagatggaacctaccttaccaattcctggagacaggacagcaacggtaagtggtattacctgaatgaagatggctggatgctaaaaaatgctaacacaccagacggttaccatgtagatgctaatggtgtatgggatggtgacgctgcaactgaaagtgaaagcgaagaagcagctgaataattgatttgaaatatttgatgttttatatttactgcaggatcataattattttggtcctgcagttttcgcatattcggactataatatataggtgcttatttcttgttcgtccttaaaattcatgttattattaaatggtagcaggcttatataacaatattagaagggaactgcatcgatgaagaatttgaatattcctgttggcgtttcagattttgaaaagatccgaaaaaatgaatattactatattgataaatctggtttgattgaagatcttttaaaaagaacagcagaagtaacattaattactcgtccacgtcgttttggtaaaaccttaggcatgagtatgctggcgaacttctttgatatcagaaaaaacagtaaagaaatatttgagggattggagatctgtgatcatcaaactctttgcagcgaatggatgaatcagtatccaacaatttttgtttcatttcgacaggtagatggactgaactttaatggagcctatgacatgcttacaatggtcatttcagaattgtacaaagaacatctatatctgctagacagtgataaaataagcgaatacgataaagagcttgccaggcaattaatacagggtgttgcttctgcaaaggatataaaaagcagcttattatttttaacaagattaatgcagcaatattatggaaagaaggcagttcttcttatagatgaatacgatgttcctgtagctaaagcaagcagtcatggctattacaaagaaatgcttgatgttatgaaaggtttaatgctggcattaaaggacaatacatctctttgttttgcagtgatcacaggatgtttaaaaattgcaaaggaaagcatttttacaggaacgaacaactttgtttctgatacgattacagattcgcggttaaatgaatactttggctttgtacaaagtgagattgatcagatgcttaaagatgcagacgcaatggagtatgctctaaatataaaaaaatggtacgatggctatcattttggagattatgatatttattgcccatgggatgtaatgaactatctttttgaacttcagcacaatccaaaaacaaaacctgtcagttattggaaaaataccagtgacaatgcaattatcaggtcgtttattgactatgcaggcagtaccattacacagaaattggaagtgctgatggcaggtggatatattatccaacgcatagatgaaaatttaacgtacgactatttacattcttctgaagacaatctttggagcatgttgtatttaactggatatttaactaaattacgtgaaaatgattatgagggtgaattgctcgaaggaacaatggcactaatcatccccaacgctgaaataaaagaaatttttgaaacgaccgttattaaatggtttgatgacagtgcaaaaaaatggaatagaaatgctttgtttgatgcggtttggaatggtgacagtgagcgcatcacaaaagaaatgaattctcttttgcggcgtacaatcagttaccatgattataaagaggatttttaccatgcttttcttgcaggtatctttacaggcgccggatatatggtggactctaataaagaacatggcgaagggcggagtgatgtggtcgtttacgattttatcaatgcacgtgtagctatttttgaagcaaaatatacgaaagttctggataatttggaaaatgaatgtgatattgcattacaacagatcaatgatcgaatgtatgctaaggaatacgaagatgattatgatgagattttatgctatgggatttcatttttcaaaaagcgatgtatggtaagaaagaaataaaataattgctccttttaatacttttccgtattgcgaggtggaaggggataccattgatttatactatttgaaatgttatactttatgcaaaattacgcattaaattaagaaaaagtgagggctatcctttatgaaagaaacaaacacaactgcctggtttcagtcacttgaaaaggctttaggaaaactggcagcaattgcagcagtggttattttgttgatttttccattgtatgtaagagatttttattttgatatattaaatgcaaaatatcaattttattatattacaatgttagcagtactcattatagcattcattatatttgtttttcatgttattcaggatttcagatatgaggatgggaaaaatgtaaaggtaatgtttcgcagcttttctattaaaaaaatgcctttatctcatagctttgccagtatatttctgatcgtatgcattatatctacattgcagtcacagtatttatacgaatcattttggggaaatgagggaagatacacgggactgtttttattggctatttacgtgatcacttttctttttatcagtagatttttgaaattaaagaaaagatatttgaatttgtttttggttgcaggaatgttggcgtgtatattcggaattaccgactattttaaattaaatctctttcatttcaaggatgaattagtagctgctgattggcctgtttatacatctacatttgggaatattaatacgtataatgcatatgtagccttagtgattggctgttgcggggcattatttattgatgcagaaacgaagaaagaaaaaatatggtattttatctgctatctgatcgcgtcttattcattgatcacaggtggaagtgataatgcatatctggcattgcttgcactgtttggtttcctgcctttctgggcatttagaacctggaaaggtgtagaaaaatattttgttatgttatcttcatttgcaactataacctacatagccggactgatccataatcatatgggaaacagagttgagatactggaaggtgttttcagtgttgtgatccgttctcgtctgctggtgtttgcagttgcgggattatggttgttaacagttattttgtatgtaatagaggcagctgcaaaggaaagaatatataagttaggaaaacttccagtgtatatctggactgtattggctgcagttattatattggcagtcggatatgtactttatgatgccaatgcaggcggacatgcagataagtatggaagcgtccagagatatgttcattttgatgatgactggggaacacaaagaggtatggtctggagactggctctggatgattataaaaatgaatttacatggaatgaaaaggtttttggttatggaccggaaacgtttggtattatgacgcatcagtggaataatgatgaaaccattgcgaaaaccactgtaatttacgataatgcacataatgaatatcttcagtattttgtaactattggaccgattggagtgctttcttatgtgggaatattaatttgcgcctgcatagaaatgaacagaagaaaagaaaaatctccttatgtgttaggctgtttctttgcagtgttatgctatgctgtacaggcaactgttaacttatgcgtgccgattgttgcgccgatcatgtggatgttgatgagcgttggaacagctcagagcgaggacgaggaatgacacaggctgctttcttattatttgtatttttaaaacagttttatataaaaagttcaggcagtgttggaatcgctgatctgtgtatggctttttgcgtgatatttcttgttttagatatagtacgcggaaagagaaaaatgccttcggtgacagacttgaaaagagaaaaattcttaattgcatttctgatctgcgtagtaattataaatctgttttttactattaaagatcgctgcctggattatgaacgatataccttatactggatttttaatggggcggccatatggtgtttcttagaattggcagataaagactttttaaaaaagttgaatggggtatgtaagatcaatattctaacgcaggcagttatatgggtgcttggttatggaagagtatttacagaatattggggaccaacccggtatatgggtacctttaatgatcctaatcagtatgcattttatctgttttgtatgattttattaatcagcttgtatgcatgcaattatggggaccgtacggcccccatctattattgtctgggtgtgttttttatgagtatatccaaatccacgggcatttttttaggtttgatgttgtatacagtaggaatggcgatatggttttatgtaagatataggagtaaatggaacattcccagaaaaacagaaatgacgttgggcgtggtacttatactggcagctatcgcaatagtgataaaaattttcccgggtccggattttaatcttaagaatacggattatactatgcttaccagaatacaggaaaagatatggaaagtactatatggaggcaattctaccatgctttccgaccggggaatggaccgggtggcattgtatcctagatatttattgttaggagcaggagaaggtaattttaatcgtttcctgaaagccgctcaacaaaatgagatccattgcagttttctcaatatatggtttagttatggtgtgattccaactgtattacttttaaagtggctttgggaaaaaatgagaaaaatttctgctgtagaatggataattgccggttctttaatagtagaaagctttttgctggtaaattatcgtcagccattcttctggatgatccttttatatggctatatacggcagaagaatcaagaaaaaactgcttcaacgttgtcttttcagcagtcagatgatatactgtaaaatggtttatcaggcggaatataagattacaagcgaaatatagataggaaataaagacttatgaggatagatgaaaaatacaaacgactgatcaaatgcttcttttcagtggttatgatcctgcttcttacagtaacatatcatcagttttgggttcgttattataataagatcattttgtatccgttttaccgcagaggtatgtggatgatggcgggaatttacgctgctatgctgatcttctttatgaatgcgtatggcggttttaaaatcggatatctgagaaaaggaaatctgatttattcccaggcgttgtctttgatatttacgaatatttttacatactttcaactgtctgtactggataagaaactatttgaactgaagatggttctagttatgacagtagcagagttattgatcgtatggtgctggacgatgttgtttcagcttttgtatgcaaatgcctttccaccaaggagaatgttgctgatttcaggagaacggtcggattatcatttaatagaaaagatcaatgccagagatgataaatatatgatctgcgaaacgatcaattatcatatgggtaaagaggcactgattgagaaaatccatcagtatgatgcgattattgttggtgatattccttctcatgaaagaaatgtaataatcaagtattgttttgatcattcgatcaggacatacagtgttcctaaaatatcggatattctgcttcgcagttctgatgaactgaatttgtttgatacaccattattattgtcaagaaatatgggattaagcattgagcagcagtttgtgaaacgtgtgatcgatatcatcggatctatgataggaattattattacaattccgttttttattgtcatcggactgagtattaagctgacagaccatggaccaattttttatacccagacacgtttaaccaaagatggaagaccctttaaaatttataagttccgtacaatgatacagaatgcagaaaaagacggaattccacgattggcagcagaagaggatccgcgtattcttcctgtaggacgtttacttcgcgcgacccgtctggacgagttgccacaggtacttaacatcttaaaaggtgatatgtccattgtaggtccacgtccggagcgtccggaactggtagaagagtttactaatgaaattccggaatttccagacagaatgaaagtaaaagccggcctgacgggctatgcccaggtgtatggaaaatataataccacaccatatgataaactgaaatttgatcttatgtatatccgtaagtattcagttcttttagatctgaaacttatcattatgacaccgaagatcctgtttttgaaagaaagtacagaaggagtggagaaatgagaaaagctctcctggtaacccacgtaagtgggtttgtgcctcaatttgaaatgaataatgtacatatccttcagaatatgggatatgaggtgcattatgccagtaatttccataatccttcttatggtgacgataatagccgcctggaaggaaccggaattatctgtcatcaaatagactttgagagaagtccttttaaacggaagaatataactgcgtacaggcagttaaaaaaattaatggaagaacatgaatttgacctggtgcactgccacacccctatgggtggggctttagcccgtctggcagcacataatacccatacaggtccggtgatctacactgctcatggcttccatttttttaaaggagcgccacttataaattggatgatttattatccggtggaatgttacttgtctaggtatacagatgttttgatttgtattaatgtggaagattataaacgtgcgaaaaagcatttttatgccaaaaatgtagttcggatccctggagtaggactggatattgaacgaattgaaagtacaatcgtaaataccaatcagaaaaaggaacagttaggaattcaaaatgatgaatatgtattgctttcagtaggagaaatgacagcgaacaaaaatcatgaattggttttaagagcattaaaaaaattgaataataaaaaaatcaaatatttattgtgtggtcatggagaggaggaaaaaaagcttaaaaatttagtaacagacttacagttgaatgatcaagtgctttttttaggttatagaaaagatgtttttgaaatttataggatagcagatatatttgtatttccatcaataagagaaggaatgccagttgctctaatggaggcaatggcaagcaatttaccggttatatgttctaatattcgtggaaacagagaacttataaaaaatgattttggtggcagattaatagaagggcataatatcgatgattatgcgagggcaatagctgatttggctggtgatagagagaaatgcttacgttttggccaatataatgcgttaacaattagaaattatgataaaagtaagtctctagaaattatgaaacaggtttatagagaactttgtaagtaaaagtttttatttaagcaggtatttgggagatagttatggttaatcttaaagataaagtaaaaaaattgacagtgatttatatttgtttttttgcaatatgtgcgttattttattttgtagcaggagatcagattcagacgaaaagaagtgtttcacctcagatcgtaccagatggaattgtaggagagttgatagatggagttacgatcgaccaggaatttttatgtaatcagaaaaagttagaagcaatttcactgatgtttacaaattacatgagagaaaatacaggaacagttaagcttgtattaaaagacaagaataccaatacaattttagctgaaaccagtttagatgtcgctgctgttacgccggatatgaaatataattggaatatggatcctgtggtagatgatgtggaaaacaaagagttaattttgtctataatgtcagattcaaaatcaggagagggaatatctgtatattgtaattcaacgttgaatacaggagacaaagctttatatagaaatggagaagctatatcagggtgtcttgcatttcaaaccacacttatatcaaggtattttttgggccaatatttttgggttataatggcttcttttgcaatactgtttggatgttattatgtttattcttgtgttgcagctaccaaaggcaaatttactattggtatggtgatgcatggagtatggtgtagatatggttttttgatcaaacagcttgtttctcgtgactttaaaacaaaatataaaagatctgtattgggttatctgtggagttttttaaatccgttgatgactatgatggtacagtatattgtgttctctcagttgtttcggtccaatattgaaaatttcccagtatatttattatcgggcatcgtattattcagcttctttacagaaagcgtaggccagggattaacggcaattttggcgaatgcatcattgatcacgaaagtatatgtgcctaaatatatttatcctgtaactaaggttgtatcaagctccattaatctgtttatttcgctgatcccgttgatgatagtagtattattgactggtcagcgcattacaaaagcaatattattaataccatttccgttgatatgcctgttgatattctgtataggaatgacatttatgttatgtacatcagaagtatttttcagggatactcaatatttatggggggttgcaacattagcatggacatatgcaacaccattattttatccagaaaatattatcccagatcgatttaagtttattcagacttataatcctatgtatcactatataaaatttataaggattattttgatagatggggtatcacctacaccagaagaatatttatattgtttattattttcatttggaactttaattgttggtgcctggatatttaagaaattccagaatcgtttcgtattgtatatataaaatatagaagggttaagacatatgacaatgatagatgtgagccatgtgacaatgcagtttaacatggcaaatgacaagatcattagtttgaaagaaactgtagttgctttattaagaggaaaattaaaatacaagaaatttacggcattggatgatgtgagtttttctgtagaaccgggggaagttgtaggtattattggaaagaacggtgcaggaaaaagtacattattaaaaatcattgccggagtattacagccaacaaaaggtagtgtttcagcaaatggaaaaatagtccctatgttggaactgggatctggctttgacatggaattaaatggtgtggaaaatatttatttaaatggggcaattttaggttataccaaagaatttctggatagcaaatttgaagaaatcgtagaattttcagagttaggtgattttattaatatgcctatacgtaactattcttcaggtatgatggcaagacttgcattttcaattgcaacagtggtaaaaccggaaatccttattgtagatgagatattatcagtaggagatgcgggatttcaggcgaaaagtctgaaacgaatgatggaattaatgagtggtggaactacggtgttatttgtttcacatacattaaaacaaattgaagaattgtgtaatcgtgtagtatggcttgaagatcacaaagtaaaaaaagttggtgatgtaaaagaaatatgtgaagaatacagaaggatgtgggagtcatgagccaggtaacaagatgttacagaggaataaaaagacgtttaaaaagaattttgacacctaaaattgatatttataaagaatataaaagtgctgtaaaaactgggaaagcagataatttaaaagtaacagcagtaatcccaaactataattatgaaagatttttaaatgagcggatcgattcaattttgtttcagacgtatcctgtaaatgaattgatcatcttagatgactgctctactgataaaagtgttgaattgattgaaagcaggatccgtaataataaaacggatattccaatccgattaataaagaatggacataattcgggaagtgtttttgcacaatggcagaaagcctttcaggctgcaaccggggattatgtgtggattgcggaagcagatgatagctgcagtccttattttcttgagaatattatgcctgcatttaaagataatacaatggtgatctcttactgtgagtcattgactatagatgaaaaaaatcgactgttgatgcaagatttgagggaatggattgatatatatggtacaggtaagtgggatacagattatgtcaatgatggaatgaaagaagtttcagagacaatgtgtatcaataacacgattgccaatgcttcaagtgcggtatttagaaaaggcgattattacaatataatggaagaagcgaaacgctatcgtctggcaggtgattggtatacttatatgggtatattgagactgggaaagatttcttattgtaaacaatcgctgaattatcaccggatgcaggaaaaaagcgtaacattgactacaaatgcacataaagaatttgatgagattgtttcattgcaaaattttgcaatgaattattttgatgtaaaagaagagacaaaggaattaatttatgagagacgcgcgaaaaaacgtagacagcttggtttgcagggatatcatgctgtcgattattgttcccgtatataacacagaaaaatatttagcaaaatgtttagattctattatacaagcattagagaaggtagagatcaaaacagaagtattagttattaatgatggttctacagataattctaaaattgttatagaaaaatataaaaatgaacatcctcaattaattgcagcatatgataagccaaatgggggattgtcggatgtgaaaaattttggattggaccatgcaaaaggagagtttatttcatttatagattctgatgattttgtagatccggaaatgttttatgacatgatgaatggcataatgaattcatctgccgatgcagctgtatgtgatataaaattagtgtatgatgataaaacagaaagagtctggccttgtactaattctgcaaagacagatgcttttgaggcagtgatcgatatgcctatgatggccagttcatgtaataaaattattagaaagtccttatttgatgggatttattttccaaaaggaataaataatgaagatattgcggtgacacccattgtattggggcgaacatcgaaaattgttatcataaataaaccgtattataattattatcagcgctctggttctatacagaacggagaatttaacgaaagaagatttgcaatattacagacagctaggttatgcattgataatgcagcagtattaggaaaagaaaaacaaaatataattaaaaactctttatatgctcatcaaattctggcattggcattgtaccctgttcgagaacaaaaatttggaaaaagattaaagctattaaaagagtacatgaggcgtatacataatacatttccggatttttggagaaatatggcggtattatcttatgggatgtatgatggtagaaatgaaaaaatatttaaacaattatcgataaaactgttgagtcataaatgctattttggggttagttgtttctggtctatagtaaatatgatcttaaaagtttgatcactgaatgttggaaggataagtttatggagcatttagtaagtatagtagtgccagtatataatgcagagagatatctttgtacgagcattcatgcgttgcaaaagcaggactattctaatattgaaattattttagtagacgatggctcaaaagatgcgtctccgtctatttgcgattcgtttgaaaaggaagataagcgaattagggctatacataagacaaatggaggagttagttctgcgagaaatgcaggtatagaagcagcaactggaaaatatataatgtttgtggacagcgatgatctatgtgaaagcaatatagttagtcgtatggtatttttggcagaacactggaatgttaattttgttatatgtggatttagaacagtaaatgatataaaaagtgctttaaatccaataagacatgagaatacatcagaattagtgtatgcattgtcaaaaagtgaattaatgaattctttaggatacatgataatgagaaggcctactatgtttgcgccttggaataagttatttgacctggagatcatacgtaaaaataatataaaatttatacctacagtaagctatggagaagattttttatttaatttagagtatctgaaatattgcaatggtgctatagaaacaaatgaaaaattgtataattatattttacaaaatccagattcgttagaagcaaaatataagtcagatttatttgaaaatcagacaatgttatataaagctgcaaaacaggttatgatagataattctgtatatgagggagataatatatacaatttagactgttattatgtacataggttattatattgcatagaacaacaggataatcttcaaaattatagaacgaatacagaacgccaggaatatgttgcatctttttgtaaaacagaagatgcgatcaatgcagtctataatgcaaacttaacaggggaacctgcgcaaaggatttttaccgatctgattaaaacaagaaaatttacagaagtatacgatgcagttataaattgcaaaaagggtattgatgatgaaacttataaattgagatatgtcagatataagattcaagatgacggccctaatatagttggaagtagacaaaaaataaaatgggtgttttattcatttaaatcaattaagaagtatggcttagtaattacattgaaaagaatttcaggaaaaataaacagaaagtttggaagataaaatggcagttataagtgtgattgtaccagtctataaagtagaaaaattcctggatcgctgcattaattctattatacagcaaacatttaccaatttggaaattattttggtagatgatggttctccagatagatcaggtgaaatttgcgatgaatggaaaatgaaggacaaaagaattcgcgtgatacacaaagaaaatggtggtttatctgatgcgcgtaataaagggttggatgttgcaactggtgattatgtagcttttatagatagtgatgattggattgatccagatatgtttcagctcttatatgatgcaacacagaaataccaagcagatattgcagaatgtagctggcggtgtatttatagtgatcgaatcgaggaagaaacagataatacaggagagtatattgttggggacaatgtatttgcactgcatggagaaattcaatggaaatattttaaaccaatcgcatgcaacaaaatttatgataaaaagatatttgaaaatataagatttcctgtaggtaagcttcatgaagatgagtttactacacatttggcattttataatgctcgcaagttagtatatattgatgtttcaaagtacaattatgatcggacaagagaggaaagtattacggcatcttttagggaaaaaaatctggatgtaatagatgcgttacaaagtcgtctggattttttctatgaaaaagggattgtagaattgcagacagaaatggaaaatatgtatttctgcgtgttactggatcggttgtataaatgttatttatatggaataaagacagatcgtgtaagaaaaataatctatgatacaaatgaaaagtattttttgaatatggaattgcccttaaatccaaattataagtatgaattatctatgttaaaaatatcatataatgtatttatattatgcaggaaatataaatggtttaataagctggtccgtaagatgcgttttattatgtatggtaatgtatgtaactaaatgatgattttaggtagaggatgattatagaaatgcttaaaaatatttggcctataaataaattatataatttatcagatcgtgtatatcaattaaaaagtcaatatttagaattatgcgaagcaaatgaaaagctgcaaaaagaaaatgagagtttaaacaaaaaacttcaggtattagaagaaaagaataataaacttgaagaaaaaaataatgaatttagtttagagtttgccagttataaaaaagaagccagtgattatgactggttttcaaaatttggttatgaccggatgatatcagatctgcagatgagttgtgtagaaaatatattgcccggaaacagagaacgcttggcagcattaaaagatacccataaaggagaaagttgttttattatcggaaatggtccctcattaaaagctgaagacctggaattattgaaaaacaataatattttctgctttgcttctaaacgtattaatttgatctatgataaaacttcatggagaccggatatctgggctgcatccgatctggattatgtagaaacctatctggacgaaattaaggaaatgaagggttatacaaaattattatgtgcacaggtaattacaagacaaatggggattgtggatgatgcggtttattatccatttgtccaaatggaaagaagaccaccgtggtttaatgcggatattatgcttggggtacatttctggggaacgatcacatgcaaactgatcaactttgctgtatacatgggatttaagaatatttatcttcttggagttgataataactggccggtgagaaaaaatgaagatggaaaatatatgtatgatgttaatgtaaaaagccattttgatgattcttattttgcaggaggatactcagaaaagttagaaaaaaatattaatgatatgattaaatcaatagagtatatggatgcttcatataagagtgttaaatggaactgtgaacagttgggagttaaaatatttaattcgacccgtggaggaaaattagaagaatttccaagaataaaaatagaggatgcaataaataaaatacagtgctagatgactccaactcgtaagagttggagaactttatattttagaattaattttgataacagaaagattgatattgaaacataagggaataataaatgatatacagtaaggattatcaatatatatcaaaacggacaagacaaatttgggctaatgtatggatgctattaacaccggtaatattatttttgatgatggaacatatcaataatccatatggtaatcttaatattgggttaaaatattggattattaatgtggctattttagagataatattcatatttttctattatatttgttttccgtatagaataactgttattatattttatggcattggtgtagtatttagtattgcaaattactgtgtaggtatttttagaaatggaaatgcaataatgccgtctgacataccagtattaaaaacggctatgaatgtgtcatcaaattataaaatagaacttccaattaatagttttaagtggatcagtctggcaatcatatgttgtgttgtcacagtatgtgtttgcagaatgatagaaaacaggatgaaaataaagaccaggatctgtttgggaggtttaattcttgtattgactttaagcggttatatgggaattgattttaagaatggttattataaaataaacttggattattgggagataagtaattcttattataaatatggaatacctgtaacttttttgactttatgccaaaacacaaaagtgaaaaaaccggaaaattataaaaaagaaagtgttatagaggtatataatacatatgatgataacaataaccgggaacagaatataacagatgataaaaggcctacagtaattgcaattatgaacgaatcctggagtgatttaaatattattcatgattttgaaagcaatcctgattatatgccgttctggcatagttttgatacacctgttatgaagggcgatctacttgtttcggttcatggatcgagaacctgtaacacagagtttgaatttttaacaggggcaagtatgagaaatttacctagattgagttatccgtatcagcagtattccttgaaaactttgcccagtttagcacgggaatttaaaaataatggttatgatacagtagcgatccatccgggaaaaccagagaactggaatagaaaaaatgcattgttgaatttaggatttgaccgttttattgataaaaatgattttattgatccagagtatataggttattttattagtgacaaatcttgttacgataagattatagaagaatttaaaaataaagaaaaggaaaagtttatctttgcagtaacgatacaaaatcatggtggttataactcatcaagatttaataatgatgaaatggtacaattaggatcagaattaaatacatatacagacgctagggaatatttaacattaattcaaaaggcagatcaagcattggaaagtttgtttacatattttgaaaaaatagacgagccagtaataatatgtatttttggagatcatcaaccatatttagatgaggagttttatgaaaagctatatggtcattctctgaaagagttatcttcagaagaggaggaaaaacgctatatgactccatatttaatttggtcaaattatgatactggaatacagaaagaaaggaaaaatacaagtgcgaattttttaggcacattattacttaatgcttcgggcatattagaaaatccgttttatgaatatatttattctatgcagcaggaaataacagaaatgaatagagattattatagaacgaaagatggcgttcttcataaatcagacgaagatgatgaatggttaaaagaataccaagatatgcaatattatgaaatgtttgataaataattaatgggacaagcaaaaaaatatatagatgggagattgatcttatggaaaaatataataaagatattaccgcagtaatacccgttagagaaggaagtacacgattaaaaaataaaaatgtagcaccatttgccgggactaatttattaataaataaaattaaccagttaaaagaggttaaggaaatttcaagaatcgtagtttcgtcagattctgatatgatgttagcgatggcgaaagagcgaggcgttatgactcataaaagatctccagagtattgcgatgaaaaaacgaaaagctttggggaagtcgttcgtcatgtagcagaaaatgttgagggaactcatatattatgggcaacatgtactgcaccattagtatttccaaaagtatatagaagcgcaatcaatgaatattttcctgcacttgaagcgggatatgattctttagtttcctttgaggtaataaaacgatatttatgggatgagaatggtcctgtgaattatgaactaggaattaagcatgttccatcccagcaattacctaatttgtatattgtaacagatggaatcttgctagctccacgtgaaaaaatgattgagtggtcatattttcatggtagaaatccgtatagatttatattagataaaagaacggcagtggatatagatgatggattagatttagcatgtgcaagggcatggctggatatggatgaatctgtttcacaaatagatccatattgtatagatgctataaagtaaagatagttggtttctggagatgataggccgagtcggtaataccgaaaaagaggtatagcaagatgttgctttttctggagctaacaaataagggggaggcgattaccataagcacatcaatcaaattacctgtcggaattgaaaattttgaagagattcgtacaggtggttactattatgtggataaaacaaagctgataaaacagctatttgccagcggtggtaaagtaaatcttttcacgcgtcctcgccgatttggtaaaacccttaatatgagtatgcttaaatgcttcctggaaataggagcgaagccttctttatttgatggattgtatatttctgagaataagcagctgtgtagttcatttatgggtaaatatcccgttgttttcatcactttgaaaaacgttgatggactgagttttgaggaagcgaaatatcgctttgttgatgtgattggaagtgaggcaagccgctttagctttcttttggatagtgatcgtatttcttccaatgaaaaagaaatgtataaggcgattatttccatgagtgaaggctcatttaaaatgaacacgcaggtccttttaagatcattaaagactttatctgagttattgtataagcattatgataaaaagacaatcattttgattgatgaatatgatgtgcctttagataaagcttttcagtacggatattataaagagatggtgacttttatacgtggactgttgggggatgtgctgaaaacaaatgatgctttggaatttgctgtcttaacggggtgccttcgtgtttcaaaagaaagtatttttacaggattgaataactttaagattttgtctattacagataccagatttgatgaacaatttggatttacagatagagaggtaaaggatcttctttcttattacaatgtagaagataagtttaaagaaacgaaagaatggtatgatggttatcgtttcggaaatgtggatatatattgtccatgggatgtgatcaactatgttgacaggatcaaggatgaccctggtgcccgtccggaagctttttggatcaataccagtggcaattttcaaatacggaggagctgcaattcttctggaaagcggttgaagaaggaaatacggaaggaatagaaaaatatcttaacagggtattaagtaactccgtcagtgtatttgataccaaagccagaaatgaggagaaagaaagttcgtatcataatctgctggttggaatacttaccggaaatgcggattggttgataaaatcaaatattgaagcaggtgagggatttgctgatattgttgcagaaacagatgatctggattcaggcattattgtggaactgaaatacacaaaagaatttgagagaatggaacaggcatgtcagaaagcgattgctcagatcaaaaatcaaagatattatgagtatttactgaatgatgacagacgaaatattttattttatggaataacattttgcaaaaagagatgtaaggttattgttgaaagaataaacatgtaactgtgaaatcttcttgagatccatgaaaatactctataaaatcacagaaaagaagttgccggcagagaaatcctttcttataatgaaatatataaaatgaaagtattacgaggtatataatatggcagaaccgcgttacggtgaagaacgtaaacaaatgggaagtatagtaggggaccggcctaagatatctgttattatgggtgtttataatggtgcggacagagtggacgaggcaatagcgtctattcgtgtgcagacttttactgactgggagtttattatatgtgatgatgcgtctacagataatacctgggagaagctggttgagtggagcaagatcgattccaggatcgttccaatccgtaatgagaagaatatgaaactggcagctactttgaataaatgtctggagcatgcttctggaagttatatagctcgtatggatgatgatgattacagttatccgtggcgtctgatggcacagaatgattttctggatgtgaatacttattatgcctttgtatcaggccaggtaaatggacttacgaaagagtttgggattattgaagattactggcacagaaaagaatttcctgaaaagaaagattttttaaagggctctcagtttatacatccggcaacgatgtttaggaaaggtccgcttatgaaagccggcggatacaggatcgctccggaaacccgcagaatggaagattatgacctttttatgcgtctttatgcaatgggatatattggctgtaatcttcaaagacctatgctgcgttatacggtggattttgataagacaacctatgcgcatcgtattgatgaggtgaaagtccgctatcagggatttaaagcattgggactccttccatggggatttatatatgtgatccgtccgctgatcgttggtttgatcccacatgatactttaatggaaataaaactggaagataatggcgtagacctgagaaagtatagacggagacatagacgcagaaggaaatgatatggttggaattgtcattttaaattataacagctgggcggatacggttgcgtgtgtagacagtatacatgaagcagaaaagaaattggagtttcgtatttatctggtagataactgttcaccggtgcgtcctgaacctggtgtgttggaaagcctggataaaaggggagttatttttatccagaatgaacggaatgcaggttattcggctggaaataacattgggataaaaagggcacttgaggatggctgtgaagaagtactgatcagcaattctgatgtgcgctatgaaacaggaagtatatcagaactgcaaacgtatttacaggatcacccagatgtgggaattgtaggaccgaagatttttctgcgtgatggaagtatacagaaagaatgtatgatgagaaaaacgggaatcagagaaaaatatttgctcagaacccgtttttatctgtttttccccaggttaaataatagttattggggaagagagcatgattatgagtcggaagtttttcaggtatatgcagttatggggtgctgctttatgtttagcaggaaatgtgcactggacgtaactccgttagatgaaaatccatttttatatgaagaagaactgatacttggaatttccatggagaaaaaaggctggaaaacggtgtatgatcccagcagtgtgatccatcatcttcacggaaacagcacagagaaagtaaaagcatttgcttatacctgtaatatctgcagtgagatctatttttgcagacagtatctgaatatgaaaaaatggcagatactgccactgtactggtaccggtcagtactttatgggctgaaaatgcttagataccaggatttcagaaagtatgttggggaatatgtgaaacgtacaggactggaattgaaaaagatattgtgatccaagaaaattaggaaaagcagccactaaggaacatatattccttggcggctgctttttcaaaagtataagatattgaccggatcagatactagacccgcttggattttacaaaataacaacaggtcaataaaccagatactttgcccggtttggcgttgcggtggtttcattttcatcccatacaccatcttcgctgatccagtagtacaggttttctccaagtgctttgacgtagcagttggttaccatgtagccgtttccgtcaaagtaataccatttttctttgatctcccgccagctgcaggcagggtaggactcatctttgtatacaaaacgccatttatttccagtttttttccagtttccattgtcgctgtaccatgcgtcctctacagaaaggatgtaaggctctgaaccggcagaccagctgctgttctggctgccgtaggtgcttacggcgcggaccgtaaagacataggagccggcattgttgatatagtcggaaaaatcataggaggttcctttggaggtgacagttacaagggtttttccgtcttttttcaggcagacttcatagccgtcacatccttcgatattgtcccatacggcattttttccgctccaggacagatctgtgatcttagggagctggccgccgatgcgggataaataaacctgaaggatcagtgtgcttccgtcgctgtcaatctctgagcttttatactggacattgcagccggacagagagaaggtacgtcggtttggagtggagaaacgataaccttcagcagcggaaagttcaatttcagcgcagggccattccccataatcccaggtgtcatcgtctttcagatattcactgccttctacaataaaagactggctggtagtggtggcagtaagcgttccaacagcctccccgccttttggtgccccatcccaggaaaatgagagaggtacagaggaaatggtttcttctccataggcggaaaatgatagtcctgcacacaggcaggctgcggcgacaagaatacgaaaatgttttttctgcataaaaagatcccctttccaattagtaaaatagatacttatattgtaccttatttgaaaggggatgtctaaaaatatttacagttttatgaaagcttttttaagatgcgtatttttagaaaaatacgtgctatactatcagtcgaataaagactggatcagcattttgatcatgggatcgcaggtgcggatgtgaagttcgtttgctcctacacagcgaagggtggttgccattaaagtatcttttaattccggttcgcagatgctgatcatgtttgcacaggattccacgatggaatttaagcggctggctttttcgatgacttttgtgatctggtcctgagtcaggtagaatacgaagtcagtcatagcatcgcctggtttctgtgagcaggttacacttgaaaaagaataggtttcttttaaatcgttaagcaattcgttgatactcattttttactcctcttttgtaaatgtggctttatgtactatgatatgccaccagaggagacatttcaagtgaaaatttgtttcaggaagtgatatttatgattttgaaaataaaaaaaagaaaaaaagaggcagtcaggggaggcgttgtatttctcatggctgtctgtatttgcctggggcaggtggcgcctgtttttgccctggatgcagcatggagtcaaaaagtagagatcacagcccacagaggtgattccgtaaaagcactggaaaatacgctccctgcttttgaaaaggccatagaaagcggggcagactggatcgaactggatgtaaaggagaccagggataatgttccggtggtatttcatgacagcagtttaaagcgtctcatgggacaggatggaacaatccgggaaatgcctttggaagagatcaaaaaacttcatcctgctgtaagtatggggcctggatacagtaatataaagatccctactctggaagaaacattagatacttgcaaaggcagaataaaactgaatattgaaataaaagaggatggaacggaaagcagtgattttacagaacgtgtcatacagctgatccgggataagggaatgacagaccagtgtatgatcacatcgttctgctatagtgtgttggaaaaggtaaaagccatagaaccatccctcaagactggatatatccggtcaaaagatatagaagatttcagccaatatccggctgcagatcagtttatgctcagtattgagctgatccagaaagaacgggtggatcagatccacagcctgggaaagaaggtcacagcctggacggtcaatgatctgtattccctgcgcaagtgtgaaagcgctcaggtagatgatatgatcacagatgatccgggaggcttattaaagttagatgatcagtgatcatcggtataaaaatcgttttcatgtatttttcctaatggtctgtatgggtggatttgtcatcctgcagactgtttacgatctgggaggcactttggtcggtataacccttctgttcacggatcatctcccagatggtgtcgtgcatccatttcacagtgtcgcttaagatcttgttttctgtgtccagacgcatgatctcgatattcatttctgcaataatctcacggctgttaaaacgcttgtgaggagcattgatccgttttaagaaagaagggttgtccttcatgatctcctgagccaggtagtcatcccgctcacgacatcccatatccataaattctttgtaatacatacgcaccatatgcattacatccggatggcagcatctgggacactgtggatggcgcgaagtctgatagtaagcatagtatccgcatttcggacagtaaaaaacggcgagttctctcatcacaaatccccctttttatgtagaatgattgttgaaaaatactttacattataaataacgcgaaaatctccaaaatataccgcctgtttttaaaaaaatcagaaattcggcaaaatgcacaaaaaagggcgctcctttttgtgaacggatggggaaggagcgccgtttttggggatgatcttactggatgatgccttctgtgtttacagtccagatcatatcgttttcgtctttaaaatctttgtatccgctgccaagttctggtctggaagcagacttggaggtggaacctgccttctgtacagcaccgtttacatttaccagatagcgtgtatcgtctaaggaaacaggggcaaaacgtaaatctttgtctgcttcctgtcgaaggccatttacatacagggtgttatctttgatgccatggtagccctgtccttttttactgccttctgcgtggaagagccagttctgggtctccccaaggtcctcatcataaatggtctgtttcccggttttcataataccttcttcgtcaaagtagtaattggcagctgtaccgtcagagagcctgatggactgcttgccggtctgcatttcacctgctgtgttgaaggcatattttttggagtcaatggtgaagatctccaggtcctcttttccgtagtaaggagcaccgttcttgaagtagaaacggaaatattcaccgtcttcgctgatattttccacgccttcaatggtacgccagccggaagcacgttttccgtcttcatcatagtatttatagccggagatcgccggaagggatacagagttatcttcctgatctgcggcagttgcctgggaagcagttgcagtttctgcagagtcttctgcctgagtattgtcggatgcagcagtgttctcagtggttacaggaagcttgtaccagccagtctgcatttttccttcctcaaaggtatagtaggaaccgtcgatctttttgtcgatctcattttcgatccggcgtccgttggagtcaaaataataccaggcattcaaatcttccggatcatctgtttcttcttctaaaaggacccagccggtctttctgcttccgtcttcgccaagataatagttatagccgtctacctggatggagccggtctccatgatgctgtcttcgttgaagtagtaccagtttccgtcaatggaagcccaggtggaagttaaggctttgccatcttttccataatagtaatgaaggaattcaggagcgtcatcttcggaccagtaatcttcgttgtccatagtgacccactggtaggtgacacgttttccttcttcgtttacatagtattcgtcgatctgttcggaataagcgcgaacgccgtcagcgtttaagtaataccagtcatttccggatttcttccatgaatctgtaaggggatctccgtaggagtcgtagtaataccagtttccgttttcttccgtccatccggctgcttttgcatatgccggaaaagccatggatgcagtaaatactgcagtggataatacagccaggaatgttgtctgttttctcataatataaattctctccttttgatgttttgaaaatgtgttttgttagtggccgttgatccgttgtttgcattacgcaggtcattataaccaggataaagccgcctttccagtgaaggttactggtaagtctgggcatggtttccacacctggaaatgggcgtatccaggagccccttaaggaaaatgacagtaggttttttaagcattttgtggtatgcttgttttcagatagattgatgcgtaaacgacttaaaggagaaaacgtattatgaggatgaaagtttcaaactatatttctgagatgttagtaaaagctgggatccaccaggcatttatggttacaggcggcggtgccatgcatttggatgatgcattgggacaccaggaaggccttcactgtatctatgatcaccatgagcaggcctgcgccattgcagcagaggcatatgccaggatccataatgagatggcagctctctgcgtgaccacaggtcctggaggaaccaatgccattaccggtgttttaggtgcatggctggactccattccaatgctggtactttccggacaggtgcgttatgataccacagcaaggtggtccggtacagggatccgtgctatgggtgatcaggaatttgatatttgtaaggccattgactgtatgaccaagtattcagaaatggtcattgatcctttacgtatccgctattgcctggaaaaagcattatatctggcaaagtccggccgccgtggtccaagctggctggatattcctttaaatgtccagggtgcgtatgtggagaccgatgagctgatcggatttgacccggtagattatgaaaacggaggaaatggctgggcagagaagaaaaatgtaccggctatcccggaagatgaggccggagaaggtgaaaaacgccaggttcttccaaagaaggtaacagaagagattgcaaaagcgatcattgagaagatccgtcaggcaaaacgcccggtgatcaatgcaggaaatggcatccgtctggcaggtgcccatgagactttcttaaaagtggcagaaaaactgggtattccggttgttacaggctgggacagtgaggactgtatctgggatgaacatccgttatatgtaggccgcggtggaaatatgggtgaccgtccgggaaattttgctatccagaacagtgacctggtgctttccattggaagccgtttaagtatccgtcaggtaggatataactataaaacctgggccagagccgcttatgtgatcgtaaatgatattgatgaagaggaattaaagaagccatcggttcatgtagatatgccggtccatgcagatgcagcagatctgctggcagtattggatcagtgtctggatcaggtattagaggcagaaaaagatacacttccggacagtttaagtgaacctggaaagaaacaggtatttacttacggcgaaggtcttaaagggatgacatggaatgagacctgcgctatgtggaagaagaaatatccggtggtacagaaaaaacactgggagcagggggaagagaaggcagcgaatgtatatgcagctgttcaggccatcagcaaccgcttaaaagaaggacagatcacagtagttggaaatggttctgcctgcgtagtaggcggacatgcccagatcattaaaaagggacagagatttatctccaactcagcagtggcttccatgggatatgaccttccggcagccatcggtatctgggctgcttccagaaaggacggcgcgtacagcatgggcgctgcccgtgaaggggaagatgtaatcctgatcacgggagatggaagtatccagatgaatcttcaggagctgcagaccatcatccatcacaaaatgggtattaagatctttattattaacaatggcggttatcattccatccgtcagacccagaagaatttctttggggagccattagtaggtgttggttatgacagtggtgacttaagcttcccggacatggaaaaattgtctgctgcttatggttatccttacgtaagagcagaacataacggacagctggcagaggcagtagaaaagacccttgccatggaaggaccggtgatctgtgagatcattgtatctacagaccagaactttgaaccgaagtcttccgcaaaacggttgccggatggaactttggtttctccgccattggaagatatggcaccattccttccagatgaggaaatggacgagaacatgatcattccaaggatcaaaggataaatattccgtctgttggcggtatcatcataaagatagaaaggatcagtaatcctatgaccgtgatcgttacaggagctaccagttttattggaagagcggttgtaaaggcacttttagaagaaggatgcagggtggtggcagtatcacgccctgcatcagccggggcaggaaagctgcaggaactttttgaggacctgaaaaagcaggccggggcagaaaaaaaggttttcggcagcctggaactttgtttttgtgaactgggagaaattgaaaaactggaaaaaatttacaaaaaagaagagttgcaggcaaaggcatggcttcatttaggctgggacggcgctggaagtgacaagcgcaaagatgtaaagcttcaggaaaagaacattggttatgccctgcagtctcttcacacagcagcggctcttggatgcaaacgctttttgttttccggttcccaggcagaatacgggatctgtaatgaatggatgaaagaagaacaggagtgccatcctgtatccgagtatggaaaggacaaagtcctggtatatcagcaggcaaccaaagcggcaaaagaacttggggtagactacatccatacccgtattttcagcgtgtatggtccgggggatcatccatggtctttgatcgagacctgtatccggactttcttagctaacgggcatatggaaatgggtccctgtacccagcagtggaactttctgtatgtgcaggaagcggcacagatcctggtaaaacttcttcttggcaaagttcctgcaggcgtgtataatgtggcaggagaagatacaagaccgttaaaaagctatattgaagaggtttatgagctttgcggcagaaaaggaagctatgaatttggataccggccgccgaatgcggaaggctgtgtttccttgatgccggatcttacaaaattaaaaaaagccattgattttcaccagcaggtttcttttaaagagggaatcttagagaccataaaagaggctaaaaaggagaacatataaaatgaaacgatgtattgcctgcggggctcctctctgggagacaccccttcttacattagataatatgccggcgtctgcgcagcacatgccagatgcagaacatgtaggagctgataagggactgactttggatctttgccagtgcagcggctgcggtctggtgcagtttgactgtgaacctgtggattattaccgggatgtgatccgtgccggtggatattctacgactatggcagaacttcgcagaaagcagtacaaacatctcatcgaaacctatcatctggaaggaaagcgttttattgaagttggctgtggccagggcgagtttttacaggttttaaaggaatttccggtagaggttcatggaatagaacatgatccggctctggtagaacttgcaaaaagcaagggcattgatgtagtacagggctttacagagacagaagatacggtgttcccaggtggactttacgatgtatttttatcctttaatttcctggaacatcagccggatccggtgactatgctgcgtgctatctggaataatctggaagatgatgccatgggacttattacagtgccaagttttgagtacattatggagcacagcagttattatgaactgatccgtgaccatattgcgtattatacctttgatacactgacttccctgatggagagaagcggatttgatgtagtagaagcttctatgatcaaccgggatactctttccctgatcgtgcgcaaacgtccacaggtggaaacagaaaacctgctggagtgctacgtaaacctgcgggaagagatgaatacgtatatgaagtatctgagggcatggcataagactgtgtgcatatggggagccagccatcagggctttacactggcagcaactacctgtctgggagaaaatgcagaatatatcatcgattcggcgccgtttaaacatggaaaatatgcacctgcttcccaccttcccatcgtaccgccggagtattttgaagcccatcctgtagatgccattgtgatcacagctcccggctatacagatgagatcgcagggatcataagaaagcgttttggggatcaggtagagatccgtgccatgcgctccaatcacctggaaatggtctaggaggaaatcagatgaggatcgttataacaggagctaccggatttattggaagtaatctggcaaaactgtttttaaagaaaggtgcggaggtttttgtgctggtgcgcccggagtccacgcacctggatgtacttccgaaagatgaaaaacttcatgtggtttcctgcggtttaagcaatgtaatggactgcgtttcttatattaaagaagcggacgcctttttccacctggcatggggcggtgtgaaccgtcaggagatcgactcacctgaggttcaggcgaaaaatgtagctggctccctggattgtatccgggcggcgaaagcattaaactgccgtatgtttatggatgcaggttccagagtggagtatggtcttacagatggctttatgcaggaagatatagaatgtcatccggtgaaccagtatggaaaggcaaaatgggaattttaccagaaggcagtgcctttatgtgaagaactgggactccattatgtgcatctgcgctttttcagtgtatatggaacaggagaccatccctggtctatcatttccactcttgtgcgggaacttccagcaggaaacaaggtttctttaagcgcatgcagacatcagtggaactttatgtatattgatgatgctgtggaggcagtgtatgagttgtatgaacaactgccccagtctgctgatgcaggggttaagaaaaatggtcttgtaagcaccattgtaaacattgccagcaaagatacgagagtgttaaaggactttgtagaggagatccattccattgcaggtggtgccggtgaattggagtacgggacttttgtccaggcaaaagaaggtgccctttctattaagccggatatttcacgtcttacactgcttaccagtggctggcaggaaagatttaccttccgtcagggcattgaaattatgatgaaaaaagagaaagagaacaaaaacctatgaaaaagatcagtgtattgattccctgttataacgaggtggaaaatgcaggccccatcagcaaggcagtaaccgatattttagagaaggaactgcctcagtatgattatgaacttgtatttattgataatgactccacagacggaacacgggatgtgatccgtggactgtgtaaggaaaatccaaggatcaaggctatttttaatgcaagaaatttcggtcagtttaactctccgtattatggcatgctccaggtaacaggagactgcgttattgagatggtagcagatttccaggatccggttgagatgatccccaagtatgtccatgaatgggaaaagggctataagatcgttatcggcattaagaccagtagcaaggaaaataagtttatgtactggctgcgcacctgctactacaagaccattaagaaaatgtctgatgtagaacagatcgaacattttacaggttccggtctgtatgacagggaatttattgagatcctgcgcaagttagatgatcccacaccatttttgcggggtatcgtagcggaacttggctataagcgcaaagagatcccttatgagcagccaaagcgccgtgcaggaaagacacacaacaatttctaccgtctgtatgacgctgccatgttaagcgttacttcttatacaaaagagggactgcgcctggcaacgatcttcggcggtgtctgtgcagcaggaagtatgatcattgccctgatctatctggtgatgaagctgatctggtgggatcgttttcctgcaggtatggcgcctatgctcattggaatgttgtttttaggctctgtacagttattctttatcggctttctgggagagtacattatgagtatcaatcagcgcgtgatgaagcgtcctcttgtgatcgaagaagaacggctgaactttgaccagaaagatgaaaatgtaaaggacggtaaggcaaatgaagtataaagtggatgtggtccgtatccgtgaaaattccattacactgaacggatgggctctgggaaagaccccggagagcaaggtcactttccgggtagaagatgaacatcaccagccggtgaagtgcaaaatggtttctaccagaagagatgatgtaagccagatctattttaagaaagtgatcgataaggaatttggctttgatatccagtttccatatgagagaggaaaaagttactggctgctgatccgctgtgatggcagacaggcaaagatcaaatataatgaagaactgatcaccaagagagccagtgttgcccacaagcgcatggaaaagatcaaagatctgatgaacatggaaacggtccatgtagctcttgatttctggaaggaaaatggtctccgtgcccttattaaaaaatcctgccataagatccagggactggataatgattacgattatggtgagtggtatgagctgaccaagccgacagaggaagaactgaaggcccagagggaaacacattttgaaaaagaacctttattttccgtagtcataccggtatacaaaacaccggagcgctatctgaaagagatgttagactccattctggaccagacttatggaaactgggaagtatgtattgccgatggaagccccagaggccaggatgtggaaaaggtattaaagaaatatgcacagaaagactcccggatccgttatgagatcttggggggaaacaggggcatttccggaaataccaatgcagctcttgctatggcaaagggggaatatgtgatcctggcagaccatgatgataccattccgcctcaggcattttatgaggtggcaaaggctatcaataagcatccggactgtgatgtgctgtattcagatgaagacaagctggatatggatggaaaggctttatttgatcctcattttaagccggattttaacccggacctgcttaccagtgtgaattatatctgccatttgttcgtggtgaaaaaagagttattagatcaggtaggcggcttccgccaggaatttgacggagcccaggattatgactttatcttccgctgcactgagcaggcaaaagagatcgtccatatcccacaggtactttatcactggcgctgccatcaggactctactgccagcaatccggaaagcaagatgtatgcttttgaggctggttccagagcgatcatggcccattatgagcgtatgggcatcccggcagaacgtgtggaaaagggcgtagattatggtatttaccatactacctttaagatcaaaggagagcccctgatctccattattattccaaataaggatcacagcaaggatctggatgtgtgtgtccggtctattttagagaagtctacttaccggaacctggaatttatcattgtggaaaataacagtacagagccggagacttttgcgtattataaaaagatggaagaaaaacatccgtccttccatgtagttacctggaaagaaggctttaattattctgccatcaacaattttggcgcatcctttgcaaagggagagtacctgctgcttcttaataatgatacggaactgttagagccggacagcattcgtgaaatgcttgggttctgccagagagaagaggttggtattgcgggagcaaggcttctgtatgcagatgataccattcagcatgcaggtgttgttattggtttcggcggtattgctggacatacctttatcggtcttcacaaagcggaaaacagctatttccaccgtgcaatgtgtgcccaggattacagcgctgttacagctgcctgccttatgacaaagaaatctgtttttgaggctgtgggaggtttaagtacggaactggcagttgcctttaatgatattgattactgcatgaaagtccgtgctctgggaaaactggtagtatatgccccttatgcaactctttaccattatgagtccaaatccaggggactggaagatacgcctgagaaggtggcgcggtttaacagggaagtagctattttcattaagaaatggccggacatcattaaaaatggtgatccttactacaacccgaacctgacgttaagaaagtccaattttgccctgcgtgatctgttaaaagaaaagatcggtgaaccttacgacctgtcagtttatgataagtttgcacctgaggagaaaaagagtgatgagtaataaggcgaaagtaacggtggtcattcccaattataatggtcttaagtttatggatccctgttttaaggctctggatctgcagctttgccgtgattttgacatcctggtagtggataatggttctacagacggaagcgtagaatggctgaaggaacatgagataccaagcatcttccttgagaagaataccggtttttcaggggctgtaaatgtggggatcaaagcctcaaagaccccttatgtgatccttttaaacaatgatacagaaccggactgccactatattggagagatgatcaaggccattgaacgttcaccggagatcttttctgtaagcagcaagatgatccagctgtatgaccacagcaaaatggatgatgcaggagatatgtatacactgttaggctgggcattccaacggggcgttggacgtccgtctacaggatacaaccgcagctgttctgttttttctgcctgtgcaggtgctgccatctatcgcagggaagtgtttgagaccatcggttattttgacgagatgcattttgcttatctggaagatattgatgtgggttacagggcgaagatttatggttataaaaatgtttactgcccaagcgccatggtataccacgtgggaagcggtaccagtggatcccgttacaattcatttaaggtccgtctggcagcaagaaacaatatttatctgaactataaaaatatgccatggccccagttgcttttaaatgctcttccgctgggactggggatcctggtaaaatatggattttttaagaagatcgggtttggaaaagattatctggacggtctgaaagagggagtgaagacagcaaagctgtgtaaaaaagtaaaatataacagagaccacctgaaacattatgctgccattgagtgggaattatgcaccggaactctcctctatatccgggaatttctggcccgtcaggcggcaaaacggtgaagtttattatattttaagagaaaagttatggaataatgggattgtatcatgtataatgttttgaatgaagaagccgttttctccggcggggggaaatgagtgaacagcttaacaaaaggtgatatacaatgataaaagataaccagaaaagcctgaaccatgttcaggttcttctggatgcagtggtaacagcagtagcctatatactggcgtggtttattatcgtcagcggaaaggtagtgcctttaagaggagcaactctggagccgggaccttattttctggcacttatatttattgttcctgtttatctgatcttaaatggctgttttcatctgtatgtaccaaagcgcatccagggaagaagggttgaatttgccaatatctgtaaggcaaatgtgatcggcctgatgctttttacgctgatccttttcggcggaagaagctttattgtacatctggggtatttctccaccagaatgctcctggtgttttttgttttaaatatacttcttctggcaggagaacgactggcgatccgcctgttcttacgttctcttcgtaccaatggttacaaccagaagcatgtgctcttaatcggttacagccgtgcggcagaaggttttattgaccgtgtgactttaaatccggaatggggctatcatatccagggtatcctggatgaccataaaaaagcaggttatgtttacaagaaagtccaggttttaggaccgatctcccatttggagacctttcttgcagcgaataccttagacgagatcgttattactttaagtatcggtgaatatgcaaatctggaacagatcgttgcggcctgtgaaaagtcaggtgtgcataccaaatttattccggattacaataacattatccctacgatcccttatatggaagatcttcagggacttccggtgatccatatccgccatgtacctcttaccagcgtatttaatgcaactataaagcgtatggtagatatctgtggcgcactgtttgggatcatcctgttttcacctcttatgctgctgacagcagcattgatcaaacttacttctccaggtccgatcatttacagccaggagaggatcggactgcacaaccgtccttttaaaatgtttaaattccgttccatggaagtacaggatccaaataaagaaaagaaccagtggacaacccctcatgacccccgtgttactccggtaggccgttttatacgaaagaccagtattgatgagatgcctcagttttttaacattctcattggagatatgagcctggttggtccaaggccggagcggcctctttttgtagaaaagtttaaagaagagatcccacgttatatgatcaagcaccaggtaagaccaggtcttacaggctgggcgcaggtcaatggttacagaggagatacttctattacaaagaggatcgagcatgacctgtattacattgaaaactggagccttggatttgattttaagatcatgttcctgacgatattcaaaggctttattaataaaaacgcatactagaatgacagcggtctgactgctgttatcactacaatgaggaaacgtacatgaatcacgactttgataatgaatttgaaacggatgacgagttaaaaagagggcgcagccgcagaaaagacggaaggaaatacgcttcttccggacttaccggcagaacaggcagtacaggaagaggcagccggaccgcaaggacggcagccaggtccgggaaaagccgcttaaggaccattatcatttttattgtggcagagatcattgcactggcactgatcggcgcaggctggtatggaaagcgtatgatgtccctgatgcagacggatacagagtttaataagtctgatatgacaaatccttatatctctgtggaaaaagagcaggctatgaagggatactggaccgtagctctttttggtgtggacagccgtgacagttctgtgggcaaaggaaatatgtccgatgttatcatcatctgcaatatcaatcaggaaacaggggagatcaaactggtcagccttttccgtgatacgtatctgaatgtagatgataaaaatggttacaacaagatcaaccaggcttacttcagaggcggcccgaaacaggcagtagaagccttaaacagaaacctggatctggagatcaatgattatgctacatttaactggaaagcagtagcagatgccattaatatcctgggcggtgtagatgtggaactgagcaaggcggagttttattatatcaatgcctatattacagaaacagtagagtctacaggtgttggctcttatcagttaaagagcgcaggcccgaaccatttagacggtatccaggcagttgcctatgcacgcttaagaaagatggatacagactttgcaagaacagaacgtcagagaaagatcatccagttaagctttgataaattaagacaggcaaacttttctgttgttaataatgtaatggaagtggtattcccacagatcttaagcagtatcacattagatgatgtgatcccggctgcaaagaacctgacccgttatcatatcggtgataccgccggcttccctgaggcaagaagtgatgccaatatgggtaaaaagggtgactgtgtcattccgcagaccttagagagcaatgtggtttctcttcacaagttcctgtttggtgacgaaaattacaccccaagtgatatggtaaagaagatcagcgcaaagattgcttctgatacaggtctgtataaagaaggaaagccggtaggtgatgttggtacagatggcggttatattcctaagactacagaggcaaagaaagaagacaagacaacagcggacggctcagaaagcagttcttcttctgaaaagaacaatgaaagtacttcttccacaaaagagagtattattgacggtgaaactgattttgagtatgaaacagatgaagatggaaatgtgatcgatcctccggaagattatataccaccaaccagtaaacattcttctgaaacgacccagagttctcatacaggtgaaagcagtcaggcccatccgggagagactacaaaggcagcccatccgggagactccacagaaagcttaaagcctacggttccaagcggtacgctgtcaccttcccgtaccacagaagcggcaactacagaggctgctacaaaaccatatggaccgggaagcagtgaaacaacagcagcttcatccttcaatcctggaaacagcatcaaagaagagaatgtaggcggtccgggagagatgatctcaccggcagcttaataagcattaaaagataacaccaaagtttaagaaagagatttcgtgaaagcagggagaattcctcttttgcgggatctctttttggaaggagaacagatcatatatgaggaaaaacaatttgttgaaaaagacagcctggatcgttctttccgcagtcctttttggaaccgtggcaggaacggttatgaccgggatccagattgcgtcttccggaatggtttcccagttttttgcgatcgttgcgtcagatgaggatacagtaaaggcggagggagaagcactgccgcctccagaaccatttccgggagaaaagataccggaaacatttccacaggcagcagacattccggcaccgtcaacggatgtttcagagatcgtagaagaggcaatgccaacggttgtggcagttgccagcacagccgtttaccagactccggattacggatacagctggtttttcggaggcggaagccagtcttatgaggtgccaagcagtggttccgggatcatcattggtaaaaatgatacggaactgctgatcgtgaccaataatcatgtagtgaaggacacagtatcattaaagatcacatttgtagatgatacagctgtggatgctgcggtaaaggggacagatgcagatacagatctggcagttatttccatcccgatagatcagatcccacaggaaacccaggataagatagccgttgcaaggcttggggactcagacagcttaaaagtaggacagggcgtgatcgccattggaaatgctcttgggtatggccagtccgttacagtgggatatgtaagcgccttaaaccgggaagtacagacttccgacggaaatacaagagtcctgcttcagacagatgcagccatcaatccgggaaacagtggtggcgcccttttgaacatgaaaggggaagtgatcggcatcaatgcggctaaatattcctccacagaagtagaagggattggctatgccattcctgtttcaggagtccaggagattttagatgaactgatgaaccgtaagacccgttctgaagtagaggaaagcagacggggatatctggggattcagggaactacagtagatgaagaaacagcggcaacctttgatatgccgaagggcgtttatgtatacaagatactggaagacggggctgcggctggctctgaacttcgtgagaaagatattatcaccaagctggatggcatgactgtaaagagtatgcaggaactgcagaaattcctgaaaggctatgaaatgggagagaccattgaactgctggtgcagcgccaggaagaaggccggtataaggaacagcagatccagattacgctggcaggactgccggaaggtgaaggacaacaggagaaacaggataacagggagcagcccggggaaacagcaccttccagaagagaagacagtaatccctggagttttccgggaaatggcttcccatggggaagaatgtggtaaggagaaaagacagtggacgataagaatatggaaaacgggatgacaaatggatcccaggatgataataaaaataacgataattatgagaagatctgctatatgtgccgcagaccggagagcaaggcaggaccaatgatctcaatgccgggaggcatgtgtctgtgccatgactgtatgcagaaggcttttgatacagtgactaagggaggcatggatttttcaaaaatgcccaatatgccttatatgaacatgaatttcagtgacttaagccagatgccgccagtgaatgagatccctcagagccagaaactgaaaaagaaaaaagaaccggaaaagcagctgactatgaaagatattccggcgcctcacgttataaaaggcaagctggatgaatatgtgatcggccaggacaaggcaaagaaggtcatggcagtagctgtttataatcattataagcgcgcctttttaggtggttccgacccagacggtgttgtgatcgaaaaatccaacattttaatgatcggccctacaggaagcggcaagacctatctggtaaagacgctggcaaagcttcttgatgtgccgttagctattgcagatgccacttccctgactgaagccggttatattggcgatgatattgaaagcgttgtttccaagctgttagcagctgcaggaaatgatgtaaaacgggcagaaaaaggcattatctttattgatgagatcgataagatcgcaaagaaaaaacagaccaatacaagggatgtaagcggcgagtccgttcagcaggaacttttaaagctgttagaaggcagtaccgtagaagttccggtgggatccaatcagaaaaatgcaatgactcctatggctactgtaaatacagataatatcctgtttatctgtggaggtgctttcccggatctggaaaatatcatcaaggagcgccttacaaagaaatcctccatgggatttggagctgccttaaaagacagctatgacaatgatccggatcttttaagccatgtgaccaatgaagatctgagggcatttggaatgatcccggaatttttaggacgtctgcctgtaaatgttaccttaaagggactggataaggatatgatgatccggatcttaaaggaaccgaaaaatgccatcctgcgtcagtatgaaaaacttctggcactggatgaggtaaaacttgtatttgaagaagacgcactttcctggatcgcagaggaagccttaaagcgtggaacaggcgcaagagccctcagagccattctggaagagtttatgcttgatatcatgtatgagataccaaaagacccgaatatcgggtctgtggtggtcacaaggccttatctggagaaaaagggaggtcccctgatccaggtaagagaaggataaaatgaattgggtatggaattcgatcactcccgcagccgtaaaaatgtctgcagcagatccagggttccatacccaaattctttattaggataggtaagggacggatttctggctgcgccccggatcagataacttttaatagaagcctcgctcatagtagggtagtttcccataacgatcccccagcttaaaagattggcaactgctcctgcagtgatggcggctgcagcgctggtaccggtgcggcgggagaaggcaggagcagtaccggctgctacactggatgaaagcccagggcgaaaagcagctgagatccgcaccgatggccccaggatctccactcccggagcagccagatccggctttacataatctctgctggtgtagccacggctggaatggatgtagatactgttgtttctgtgattgtaggcccctgttgtaataggcaggcgggaattgccgggaaccgtgatcgtgtttgaaggatccggttttaaaaatacagtttcatcggagataaaaccctgaaccggcagccacatatggtattcgcctgtgagaaactgtgtattgtatacacgaatggtccagattcccggggaaggacgatcaaaacgtatggatacaagctggcttccgcttccagcctcgatcagctgataacttacagtgatgaccgtagactctaaaagaaaagggatacgggtctcgttgttggataaaatggggatccggctgatccgctctccaccgggagatacaaagcctactgtatacagatcggcagcagaagaccaaagttccaggataaagccacgtttcccttcttcttctcctacccgaagttccacatcttcaaaagaagtgtcagcggaaaaccttcctgcgtaatggtgggcgagtcctgtttcatttcctgctgcgattacagtggcgattccgaaaaagccgccataattctgcgttacctggcttaagggggaggtaccggtatggctgccgtaattggttccaagtcctaaaaggatcactaaggggcgccggaaacggtcagcagtgactctcaggtatttaatccccatcataatatcattttcctggaaagcaacagtctcttccgggatcaggtaatagtcccgcagatatttctttgcgggctttaattttacaatggcaagatctgccatgggagcggcgcctgtgaagttttgaagggggaaagcagatccggctgcaaggcctgccaggaaagtgccgtggccatctgtatctttggaaggtaccagggaaaaaggatcctctaaggttaaagcttcgttgatctcttcatgagtgaattccgttccataggaggcaccgcccatgggataatattccggtacgccaggagaaaaaacagaaggatcctcaggaagggtctgatcccacagaccaaggatccgggtcgttccgtcacttttaagaaaaacaggacttgtatagtcgatccctgtatctacaataccgatgatcaccccgcttcccatattgctcagtgcaggtgtctgaagggcggaaacgatcccggcagcttccatggcggagtcgtccaacagggtaaaaagagagggaatgctgtagtagggctgacgttccagagaaaggggaagggcgttttcaagctctgtataaaaaacagcataatcattgcttacataatccacacagggaaactgctccgggtcccggagattattctgcagggatccaaaacggtaaatgaaatcagcgacatcctgggaagcaggatttaagatacattcagccataaaaaccaccggtaaaatgcttgttatcagtatatgggaaaatcaccggaagttacctgcatatctggacggaaacgggataatattgtaaaatggactcatgaaaaaagtacgaacctgttccatgtaccagaaaggatggatgtataatatgatcttaccgtggcttactggcggcattgctgccctggatctgtttataaaagacgaaatagagcgggaaggggaagaagaatttccaagggaccttcccggcacaaaggggctgatacgccttcataaaagttataattccggatttccttttggctttttaaaagaacgcccggaactggtaaaagggatccccctggcagttacatctgctgcagcaggcgcattaggcgcgtttatgacaaaaaagggctgcctggcccagaagatcggcctttccatggtccttggaggtgctatcagcaatctttatgaccgtctggtaaaaggctatgtagtggattatttctccattgaatttaaaaggctgaaaaaggtgatctttaatctgggagatatttttgtatttttaggcagcctggtatttctgatcggggaactgttggaggatatagaccttaaaaactgagcattcccccaagggttccgccaaaggcacacacgcctaataccatgagagatctggcagcctggatagaggcccggggatccatagcccaggaagcggcaaaaaggatgagaaaataaaacattcctgacagcagtccccagaaaaaacgccggtttctgacttttcttcctgtgaaaaatccacctgcgaaacaggctgcaaaatacacagcaaagatcagcaggtttaccagactttctcccaggcgcagtttgtaaagggcaaaagccagtgcccctaaaaagagggcagaaagggcataggagataaaaagagagcgcagcagcggttttatcactttagtttccatagacatctccctaaaatatgtttacagtcaagtatattcaccattgcaagccaacataacctatgttataattttatggagtttattcatatgtgccttttgaggcatataaaaaaaggaggtactgtacaatgaagcatgtaaagactttaaatgccaataccttaaaggataccatgaagaagggcggatgtggcgagtgccagacttcctgccagtctgcatgtaagacttcctgtaccgttggtaaccagagctgcgaaaactctgcccgctaatggtataggtcggtaacggattaagtgtgcaaagcccctatggtcacagagattataggggctttcccatgtgatttggattggcctgaaaggcctattacgtttagaaagagagattttaattttgattcatcagtatattaataatggttatcatattgttctggatgtgaacagcggttccgtccatgtagtagatccggtggtttatgacgccatcgcagcagtttcagaacaggttccggaaatggacaagcctgagaagctttctgaagaagtaactgcaaatgttcataaaaaattagacgagacctatggaagtgaaatggtctgtgaagcactggaagatattcaggagctgatcgatacagaacagcttcttacccgtgacatttatcgtgactttgttttagattttaagaagcgcaagaccgttgtaaaagcgctctgtctgcatattgcacacgactgcaaccttgcctgtcgttactgctttgcggaagaaggagagtatcatggccgccgtgctttaatgagctatgaagttggtaagaaagcactggatttcctggtagctaattccggaaacagagagcatctggaagtggatttcttcggcggagagcctcttttaaactggaaggtagtaaaacagctggttgaatacggccgctccttagaagaggcaaaccacaagaagtttcgttttacattaaccaccaacggcgttctcttaaacgatgagatcatggaattctgcaaccgtgagatgagcaatgtagtattaagcctggatggccgccgtgagatcaatgacaagatgcgtccgttcagaaacggcagcggcagctatgatatgatcgttccgaagttccagaagtttgctgagagcagaggacagaagaattactatgtaagaggtactttcacaagaaataacctggattttgcagatgatgtgatccattatgcagatcttggcttccagcagatgtccatggagccggtagtagctgatcctgcagaggattatgccatccgtgaagaggacattcctcagatcttaaaagaatatgacaaactggcattagaatacatcaagcgcaaaaaagagggcagaggttttaacttcttccactttatgctggatttaacagcaggtccatgtgttgcaaaacgtctggctggctgcggttccggtactgagtatctggcagttaccccatggggcgatctgtatccatgccaccagtttgtaggcaatgagaaattccttcttggaaatgtagacacaggtattgtaaatacagagacccgtgatgagtttaagctttgcaatgtatatgcaaaagaaacatgcaaggactgctttgcaagattttactgcagcggtggatgtagtgcaaatgcctataatttcagtggttctattaacggcgcatatgagatcggctgcgagatgcagaaaaagaggatcgaatgtgccatcatgatcaaggctgctttggcagacgaagaggcataatatatgaaatatcaggtaataaccaaagatggacgggcgaaacgtgcccagatggaaaccgtacatggaaccatccagacaccggttttcatgaatgtaggaactgtaggcgctattaaaggcgctgtatctaccgatgacctgcgccagatcggtactcaggtagaactttccaatacctaccaccttcatgtgcgtaccggcgacaagctgatcaaggagtatggcggactgcatcagtttatgaactgggataagccgatccttacagactccggcggtttccaggtattttcccttacagatctgcgcaagatcaaggaagaaggcgtatacttccgttcccacattgacggacataagatcttcatgggaccggaagaaagtatgcagatccagtcaaatcttggttccaccattgccatggcttttgacgagtgcccgccaagccatgcagattatgattatatccgcaattccgtagaccgcactacacgctggttaaagcgctgtaagacagaaatggatcgtttgaattcccttccggacaccattaacaaagaacagctgttgtttggcatcaaccagggcggtgttgtagatgagatccgtatccagcatgcagaaaccattaaagagctggacctggacggctatgctatcggtggtctggctgtaggtgagacacatgaggaaatgtatcacatcctggatgtgacggtacctcatctgccggaagataagcctgtatatcttatgggggtaggaacacctgccaatatcttagaggcagtagagcgtggggtagatttctttgactgtgtttacccatccagaaacggccgtcatggtcatgtatacaccaaccatggcaaattaaatctgtttaaccagaaatatgaactggaccacagcccgattgaagaaggctgccagtgtccggcctgccgttcctacagcagagcctatatccgtcatctgttaaaggcaaaagaaatgctgggaatgcggttatgtaccttgcataatttgtatttttataataaaatgatggaggagatccgcgacgccatcgaagaacaccgtttcgcagaatacaaggcagctaaacttgccggtatggaaggcaaatagcaggtagaagcgggtaaacaaaaaactataactgctgcggcgaggcggcagcagatgtgaaggaggaaaaaccatgcagggaatgggctttatagttatctatatcgtattttttgcagctctgatctattttacttcaatccgtccacagaagaaggaaagacagaaacagcaggagatgttaagcagcgttgctgtaggagataccattcttactaccagcggtttttacggtgtgatcattgatatgaccgatgataccgtgatcgttgagttcggcagcaacaaaaactgccgtatcccaatgcagaaagctgcgatcgttcaggtagagaagccagagacaaaataagactggttttttacaaagaaaatgaacattaaaaatgtcggaggtttggagcttggcagccggtctgcacaggtgagaacgtccggcatttttgcataataagaaaggcggggttattttgatcaggaatattgtatttgatatgggaaaagttctaatggattattctggtatgccggtatgccgtcattttacagacaatgaggcactggcaaagagagtctgcacggctgtgtttgattcaccggaatgggttcttttggatatgggagtgatcacagaggaagatggtattaagaagatgatcagccgtctggatacagaagaagaaaaaaaactggctgtgaagtctttcgaccactggcatgagtataatctggtccagaagccggagatgggagatctggtccgggatctgaaagcaaaaggctacggcatctatttatgctccaatgcatctgtacgtatgcttacctgctacaaagaggtgctgccggcagtagaatgctttgacgggatcctgttttccgcagaagttctgtgcatgaaaccacagaaagaaatgtatggtcatttctttgaacggttcggtctgaaaccggaagagtgctattttattgatgacctgccaaataatattgcaggagcgaaagcctgcggtatggacggttattgctttgcagacggggatgtggaaaagttaaaacgcacactttacgaatctgtcctttcgtaattcatagtaagagtggattgctacgcacgtgctcatttcgcctcatcccgtccaatgactgtgtatccatgcaagtaagcttgcctgtatccccagtcgctgtacgggactcttaccgcaatcttaagactttcttaataatctattcaaagaacattcaaacatttccggcgattgcatgatatactttagttacataagaaatgcacgaaagtttaagaactatccttcaaccctttttgaaaatccgaaatccttagaagaaagctccgtactgacaggtacggagcttttttctgcgcatacagtataagaaaagggattttttaattgtgaatcgggcaagaatggaaattcactgtgatgaggcggctttaaagggaattaccggaaagggcgtcggtgttgcagttttagatacaggcatctaccttcatgaagacctgaaaggaaagatacagggatttaaggactttgtccatggaaaaaagcttccttatgatgataatggtcatggaacccatattgcagctatgatcgcaggcagcggtcttgcctcaggcggccttttaaaggggatcgcaccgggaagcagtattacagcgatcaaggttttagatcacagaggaaatggatatgcggcagatgttttaatgggacttaggtggatccgggaacacaggaaagaatatggcatacggatcataaatatttctgtaggatcccttaccagacgggaaatgacggaaaattccgccttggtaaaaggggtaaatgctgcctgggatgacggcttggtagtggtggtggctgcaggaaatcatggtcctgctccgggaactgtgactacgccggggatcagccggaaagtgatcacagtaggctgttctgatgatgaccgggaggtagaggtgatgggaagcagaatggtggattattccggcagaggtcctaccaatgcctgtgtgtgcaagccagatctggtagcaccgggctgcgggatcatcagctgctgtaatgaaccgggccggtattttataaaatcaggtacaagcatgtctacgcctcttgtatctggtgctattgccctgcttttggaaaaatatccgtctatgagtaataaagacgttaaactgcggatcagggagcgggcagtcgatctgggacttccccataaccagcagggctggggaaaactggacgtaaaaagactgctggcagatgaaatatgatcttatcatctgtcagcagactgcaaagaatatcgtattttatttctcccaacgtccggaagcgccacacggaagcaccagaccgttctgggaaacaggaagacctacttcctccgcttttacagttccgccgaattttggtacgatctcaacgcccatcatataggaaagaacagatggcgcaagaccggtggtataagagttgatcaagaagaacagcggatcatcagaaagcagctgtacacacagctttactaatgggtgaatggcatcttcgatcttccagatctcgccctttggtccgcggccataagatggaggatccatgataatggcatcgtagtgatttccacggcggatctcgcgctctacgaatttgacacagtcatctacgatccagcggatcggagcatcagacaggccggaagaatgggcattttcctttgcccaggtaaccatacccttagaagcatctacgtgggtcacgctggctcctgcttcggcagctgccagtgtagcacctccggtataggcaaacaggtttaatacctttacagggcgtcctgctttgcgaatcttatcaccaaaccagtcccagtttgcagcctgttccgggaaaagaccggtatgcttaaaactgaaaggctttaaattaaaggtaagttctttataattgatcgtccactgctccggcagatcaaaaaattcccactcaccgccgcctttgctgctgcgatgataatgtccgttcatcttcttccagcctttgtgtttctttggggtatcccagatcacctgaggatccggacgcaccagaagataatctccccagcgctctaatttttcacctttggaacagtcaattacttcataatctttccaaccgtcggcaagccacataaatttgataacctcgtttcttctattataatatatatgatatcctgtattccgcccagggcggatgttatagtacggttttgtatcataggactccaattgagtatagtctattttaatagggtccgtcaagagatttgagtaccagtgacatattcttgtaatagaattgaaagattaatctggttgaactataagaaaactcttggtacaatagttataaagcgcaaactgtatatttacagcagtttcggggtgaaagcagaagaagagaggaacagggcatatgaggaaaaaaatgaaagcagcctggtttctggcagcgttactatcagcagggctggcagcgttcccggctatggcagcacagggatgggcacaggaaaacagcagctgggtctactatgacagcaatggaaataaagtatataatgaatggaaaaagggagctgacggccagtggagatatctgaacggagaaggatatatggctgtaaatgcatgggcagattctgattattatgtagacagcaatggcattatggttacggacaaatggttaaagactacttctgacggcggagaagaagagtggtactattttggaagtagcggaaagaccatagatgacacctggaagaagatcaatgataagtggtatcattttgacggaaacggccgtatggaaacaggctggatcttagacgatatgtattataccggagatgacggtgtgatgcgtaccggctggcaaaaactgtatccgccggataattacgaggaagactccaacaaagtgatcccgggagctgagggcggtacattagattacggcgaagatggccagtattggtactattttggaacaaacggcaagaaatatgttccaagtgacggcaacgacaacggagattatggcaccagaaagatcgatggcatttactattgctttgatgatgacggcattttacagatgggctggaagaatgtaagaggaagttctgactcgatcaaagactatatgtactttggctctgacggaaaggcaaagatcggttggtattccatagaaccgccggaagacttagaaggttatgatggagatgtagaatggttctactttgcaaataatggaaagccaaaagctgcagactcagatcaccttaccacacaggatctgaccaagatcagtggaaagacctacttatttaataagcgtggcaatccggtctatggacttaagaaggtctatatcggatccggtgacagcaactggaccgcgttctattttggaaccaagacacagagctgtgtacagcgtggaaagatgaaagtggaagaagatgacggaaacaagacagatttctacttcagtgaaaacggccgcggctataccggtgtaaaagataattacctctattataaaggaaagcttcagaaagctacagatggtcagaagtatgtatgctataagatcgacagcagcaactatgtagtaaattcttccggaaaggttatgaaaaactctactgtaaagaccagtgacggagtgaagtttaaaacaagctccagcggctctttaagtacagcagatgatgataacgatgtaagctcttatttcacagagccggaagaaccaaactgtacagaggactgataaaatgatatctgtttcttctatattaaataggatcagatcaggatgtgctgatgcagggattaacagtaccggtattaatgtattactgatgtattaattgtagaaagaacagggcagaataaagggaaacaggtggtaaaaagcctgtttccttttttaataaaaccccttataaaaattatttagaaaaatacaaaaaaatgcttgcatttccctggaatatatgttatcttagaacagctgtgacatgatagcaaagaaacgtgaggttgctgccttacaaaaggcaggttttccgtggagcgaatgtcaagttaggaaactggcgacaagtcactgtaccaattaaagaaactgcaatttagggcagaatcagtgtgtagttctgtgaggacacacacggaaacgtgtacagtcaccgcttgtcgtacttggtttataaagtgcgaaaaggaggcgactttttttatggcaagtcaagtaatgagaatcacattaaaagcttatgatcatcagttagtagatcagtccgctggaaagatcatcgagacagtaaaaaagacaggatctcaggtgagcggaccagtgccgttaccaactaagaaagaggttgtaacaattctgcgtgcggttcataagtacaaagattccagagagcagttcgagcagagaactcacaagagactgatcgatatcactgcaccaagccagaagacagtagatgcactgtccagactggaaatgccagctggtgtgtccatcgacatcaagatgaagaccaaataatcccagtaagcattaatgattatgtttatatcctgaagggtttagatatagaagcaacactacattcctgtaggaatcaacataccggcaacggttcatagtgttccacgtatattaggctgttctaggatgaatgcgaaagcattccgctgtagatcatgaaacaggaggtaagacaatgaagaaagcgattttagcaacaaaagtcggaatgacccagatcttcaatgagaatggtgcgttagttccggtaaccgtacttcaggcaggaccttgtgtagtaactcaggttaagaccgaagagaacgacggttacaaagcagtacaggttggtttcgttgataagagagaaaaacttgttaacaaaccacagaaaggccactttgataaggctggcgtatcttacaagagatatgtgagagaattcagatttgagaatgcggaagagtattctgtaaaggatgagatcaaggctgagatcttcgcagcaggcgataagatcgatgcaaccgctatttccaaaggtaaaggcttccagggcgcaatcaagagacacggacagcacagaggacctatggctcatggttccaagttccatcgccatcagggttccaacggttccgcaactaccccaggccgcgtattcaagggcaagggaatgcctggacagatgggtcacaagcagatcactgttcagaatcttgaagtagttaaggttgatgccgagaacaacctgattctggttaagggtgcagttccaggacctaagaaatgcctggttactgtaaaggaaaccgttaaggttgagaagtaagcttttataggaaaggaggaatacacagatggcaaacgtatctgtttacaatatggaaggtaatgaagttggcacattagaactgaacgatgccgtgttcggtgtagaagtaaacgagcacctggtacatcttgcagttgttgcacagcttgctaataagcgtcagggaacacagaaagctaaaacacgttctgaggtttctggcggtggcagaaagccatggagacagaagggaaccggtcatgcaagacagggttcaacaagagctccacagtggaaaggcggcggtgttgtatttgcaccaactcctagagactacacaatcagactgaacaagaaggaaaagagagcagctcttaagtccgctctgacaagccgtgttcaggagaacaagttcatcgttgttgaagaacttaagtttaacgagatcaagacaaagaactttaagaatgttctgaacaatctgaaggttaacaaagctctggttgttttaagcgagagcgatgagaacgcagtattatccgcaagaaacattgctgatgttaagactgctcaggttggaaccatcaatgtatacgacattctgaagtacaacacagttgttgctagtaaggcagctgttgcatccatcgaggaggtatacgcataatggcagatatcaaatactatgacgtcatcttaaaaccagttatcactgagaagagcatgaacgctatgggtgataagaagtatactttcatggtacatgtagacgctaacaagtctatgatcaaagaagcagttgagaagatgttcccaggaaccaaggttgcttccgtaaacaccatgaactgcgatggcaagacaaagagaagaggaatgactttcggaaagaccgctgcttccaagaaggctattgttaagctgaccgaggatagcaaggagatcgaaatcttccagggcttataatttaagacccatcaccccgccgggtatgtgcccggccggagaacttatacggctcttatgacagccgtgaaaagaaaagaaaaggagtaaatgtcatgggaattaagaagtataatgcttatacaccttccagaagacatatgaccggttctgatttcaaggaaatcaccaagacaactccagagaagtctctggtagtatctctggctaagaacgctggtcgtaacaatcagggtaagatcactgttcgtcacagaggcggcggcagcagaagaaaatatagaattatcgatttcaagagaaacagcaaggatggtatcccggcaaccgttatcggtatcgagtacgatccaaacagaagtgcaaacatcgcactgatctgctatgcagatggtaccaagtcttatatcttagctcctcagggcttaactgatggaatgaaggttatgagcggtgacactgcagaagcaaaagttggtaactgcatgccactgtatcatgttccagtaggtactcaggtacacaacattgagctgtatcctggcaagggtggtcagctggttcgttccgctggtaactctgctcagcttatggctaaggaaggcaagtatgcaaccttacgtttaccttcaggtgaaatgagaatggttccgatcatctgccgcgcaacaatcggtgttgttggcaatggcgaacactccctgatcaacattggtaaagctggtagaacccgtcacatgggcatcagacctacagttcgcggttccgttatgaacccgaatgatcatccacacggtggtggtgaaggaaagaccggtatcggccgtccaggtccatgcacaccttggggcaagcctgctctgggtctgaagaccagaaagaaaaacaagcagtctaataagttgatcgtaagaagacgtgatggcaaaaccatcaaataattaaggaggttaagaacacatggctcgttcactgaaaaaaggaccatttgcagatgcacatctgttaaagaaagtagacgctatgaatgcagcaggacagaagcaggtaatcaagacctggtcccgtcgttcaacaatcttccctcagatggttggtcacacaatcgctgtacatgacggaagaaaacacgttccggtatacgttactgaggatatggtaggacacaaactgggtgagttcgtagcaaccagaacctacagaggccacggtaaagacgagaagaagtccgctgttagaaagtaatccacaggtaaattgaaaggaggttttacaaatggcaagaggacatagatcccaaattaagagagaaagaaatgcccagaaggacaccagaccaagcgcaacactgtcttacgctagagtgtctgtccagaaggcttgctttgtattagatgccatcagaggcaaagatttacagaccgcacttggtattgtaacttacaatcctagatatgcttccagcttagtaaagaagttactggaatcagcagcagcaaacgctgagaacaataacaacatggaccctgcaaaactgtacgtagaagagtgctacgcaaaccagggaccgatcatgaagagggttagaccgagagctcagggccgtgcttacagaatcgagaagagaatgagccacatcactgtagttctgaatgagaaataaataggaggcaaatatgggacagaaagttaatccacacggcattagagtcggtgttattaaagactgggattccagatggtatgcagaagctgattttgcagacaacctggttgaagactataatattagaaagttccttaagaacaaattaaagagctccagcgtttccaagatcgagatcgagcgcgcatctgacagagtgaaagttatcatctacactgctaagccaggcgttgttatcggtaagggcggcgcagagatcgaaaagctgaaagcagaagttcagaagatgactgctaagaagctgttcgtagacatcaaagaaatcaagagaccagacagagatgctcagctggttgctgaatctatcgcacagcagcttgagaaccgtgtatccttccgccgtgctatgaagtctaccatgagcagaaccatgaaggctggcgttaagggtatcaagactgcagttgcaggtcgtttaggcggtgctgatatggctcgtacagagttctacagcgaaggtactattccgcttcagacattaagagcagatattgactatggtttcgcagaagcagatacaacctacggcaagattggcgttaaggtatggatctacaaaggcgaggtacttcctactaaaggaaataaggaagggagcgataaataatgttaatgcctaagagagttaagcgtcgtaaacagttccgtggatctatggccggcaaggcattaagaggcaatacgatctctaacggtgagtacggtttagtcgctactgaaccatgttggatcaaatcaaaccagattgaagcagcccgtgttgctatgacccgttacattaagcgtggtggtaaagtctggatcaagattttcccggataaacctgtaacagcaaagccagcagaaacccgtatgggttccggtaagggcgctctggagtactgggtagcagttgtaaagccaggccgcgtattattcgagatcgctggtgtaccagaggaaacagctaaggaagcacttcgtcttgctatgcacaaactgccatgcaagtgcaaaattgtttctaaagcagatttagaaggcggtgataacagtgaaaactaataagtttgtagaagagttaaagaataagtcagcaaatgagctgaatgaagagttagtagctgcgaagaaggaactgtttaatttaagattccagaatgcaaccaatcagttagacaacacatcccggatcaaagaagttcgcaagaacatcgctcgtatccagactgttatcactgagaaggctaatgcttaatgaaaggagaacttaccgtggaaagaaatttaagaaaaacccgtatcggtaaagtggtaagcaacaagatggataagaccatcgttgtagcaatcgaggaccacgtaaagcacccaatgatcggtaagatcgttaagaaaaccgttaagctgaaagctcatgatgagaacaatgagtgcggcatcggtgatactgtaaaagtaatggaaacaagaccactgtccaaggataagagatggagacttgttgagattatcgagaaagcaagataattagggaaggagttaacaggtatggttcagcaggaaacaagacttaaggttgccgacaataccggtgcaaaagaacttctctgcatccgtgtattaggtggttcaaccagaagatatgcaaatatcggcgatgtcatcgttgcttctgttaaagatgcaacaccaggcggtgttgtaaagaagggcgatgttgtaaaggctgtagtagttcgtaccgttagaggcgctcgccgtaaagacggttcttacatcaagttcgatgagaacgcagcagttattattaaggatgacaagactccaagaggaactcgtatctttgggcctgtagctagagaattaagagacaagcagttcatgaagattgtctccttagctccagaagtattataaggagggtgtccactgtgcagaaaatcaagaaagacgatttagtagtagtaatcgcaggaaaagataaagacaaacagggaaaggtactctctgttgacgtaaagaagaacaaagttctggttcagggctgcaacatggttacaaagcacaccaagcagtctccagctaacccacagggcggcatcgtgaatcaggaggctccaattgatatctccaatgtaatgctggtagtagacggcaaggcaaccagagttggctttgaagtaagagacggaaagaaagtccgcgttgctaagaagaccggtaaggttgttgaataattcaggagaggaggaaaaaaacgttggctagattaaaagaacagtatcagaacgaattcgtagacgctctgattaagaaatttggatataagaacgttatgcaggtgccgaagcttgataagatcgttatcaacatgggcgtaggcgaagctaaggaaaatgccaaggttctggattccgcagttagagatctggagatcatctccggtcagaaggctgtaacaaccaaggctaaaaagtctgttgcaaacttcaagatccgtgaaggcatggcaatcggctgcaaggtaacccttcgtggtgagagaatgtacgaattccttgatcgtctgatcaacctggcactgccacgtgtacgtgactttagaggtgttaaccctaacgcatttgatggcagaggaaactatgctcttggtatcaaagagcagctgattttccctgaaattgagtacgataaagttgacaaggtaagaggtatggatatcatcttcgttaccaccgctaatactgacgaagaagcgcgtgaacttttgacattattcaatatgccttttgcaaaatagttaggaggaaacattcatggctaagacttcaatgaagatcaaacagcagcgtcctgctaaattctctaccagagagtacaatcgctgcagaatctgtggccgtccacatgcttacctgagaaaatatggtatctgccgtatttgtttccgtgagttagcatacaagggtcagattcctggcgttaagaaagcaagctggtaggctgaaggctcgttacagcgtctgacagcataggttgtcagacctggcgggtgaagatagatagaatttagaaaaggaggcattttcaaaatgacaatgagcgatccaattgcagatatgcttacaagaatccgtaatgcaaacactgcaaagcatgatacagtagatgtaccttcttccaagatgaaattagctatcgctgatatcctggtaaatgaaggttatattgcaaagtacgatctggtagaggatggcgctttccagaacatccacattaccttaaagtacggcaaagataagaacgaaaagattatttccggtatcaagagaatttccaaacctggtctgcgtgtatacgctgacaaggagaacctgccgaaggttcttggcggtctcggtactgcaatcctctccaccaatcagggcgtgatcaccgataaggaagcacgtaagcttggtgtaggcggcgaagttctggctttcgtttggtaggctttgaatacttggcgaggtcttttcgagcctagtatgaaagcccgtcctgagacttagcgaggttttttcgagcttagtcgaatggacgatagtaacttcgattgcactaagttcgtgagagacctcactaagtgcaacgaagtactttcgcacgtaaacgttctggaagacgaacgttaagtgcgaaatgtaactgaaaacagagaggacgcatatgtcctctccgagaatttaagtaggaggtaaaaaggcatgtcacgtatcggtagaatgccagttgcgattccagcaggtgtaactgttacaatcgcagaaggaaataaggtgactgtaaaaggtccaaagggaacattagagagagagctcccggttgagctgaccatcgaagagaaggacggtcacgttatcgtaagcagaccaaacgatttaaagagaatgaaatctttacatggtctgaccagaaccctgatcaacaacatgatccatggtgttactgagggttatgagaaggttcttgaagtaaacggtgttggttacagagctgctaagcagggaaagaaactgactttaaaccttggatattctcatccagtagagatggaagatccagaaggtatcgaaactgtttgcgacggacagaacaagatcatcgttaaaggtatcagtaaagaaaaagttggccagtacgctgctgagatcagagacaagagaagacctgagccttacaagggcaaaggtatcaagtatgctgatgaagttatcagacgtaaagttggtaagactggtaagaaataatttaaggagagtgtaaaaatggttaacaaacagtcaagaagcgaaattcgcgtaaagaagcacaacagaatgcgtaaccgttttgctggcacagcagagagaccgcgtctggcagtgtttagaagtaataatcatatgtatgctcaaattatcgacgatacggttggtaacacactggttgctgcttccacagttgagaaagagatcaaggctgaactggagaagacaaatgacaaggcagctgcagcatacgttggtacagtaattgcaaagagagcccttgaaaaaggtatcaaggaagttgttttcgatagaggcggctttatttatcagggtaagattcaggcattagcagatgcagctcgtgaagctggtctggatttctaatagagaggagaacaaacatgaagcgtacaattattgatgccagtcagttggagctgaatgatagagtagtggcaatcaagagagtatccaagactgttaaaggtggacgtaccatgagattttccgctctggtagtagttggtgacggaaacggccatgtgggcgtaggcttaggcaaggccggagaagttccggaagcaatccgcaaaggtaaagaggctgctgtaaagagccttgtagagatcccgatcgatgagaacaagagtattcctcatgactttatcggaaaattcggcagtgcaagcgttctgttaaagagagctccagaaggtaccggtatcatcgctggtggccctgctcgtgccgttgttgagttagctggaattaagaacatccgtacaaagtccttaggttccaataacaagaccaatgtagttcttgcaactgttgcaggtttaactgcattaaagacaccagaagagttcgcaagacttcgcggtaaatctgttgaagaaatcgtaggctaataggaggaaatagacatggcagagaagttaagaatcacattagtcaagtcccctatcggtgctattccaaagcagagagcaactgttgaggcacttggacttggaaaaatgcacaaaacagttgaaatgccagataatggcgctgttagaggcatgattcagagagtaagacatttagttaaggttgaagaaatctaattcagataaagtaaggaggtgcagtcatggagttatctaatttacagcctgctgcaggttcaaagcatagcgataattttagaagaggccgcggccatggttcaggcaatggtaagaccgctggtaagggccataagggtcagaaggctcgttctggagcaccaagaccaggctttgaaggtggacagatgccattatacagacgtctgccaaagcgtggattcaccaatatgaattctaagcacattgttggcattaacgtaagcgcactggaaagattcgacaacgatacagttgttactgtagagactctgcttgagtccggtatcgttaagaacccaagagatggtgttaagattcttggaaacggagaattaaccaaaaagctgactgttaaggtaaatgcattcagtgaaagtgcaaaatctaagattgaggctttaggtggaacctgcgaggtgatctaatgttcaaaacgattagaaacgcttttaaggtaaaagagcttcgtgggaagatcctttatacctttatgatgctggtagtcattcgatttggctgccagctgcctattccgggaattgagacatcattctttgcgaattggtttgcgaaacagacaaccgatgtgttcggtttctttaatgcgatgaccggtggatcattttcatccatgtctatcttcgcattaagcatcacaccgtacatcacttcttccattatcatccagctgctgacaattgctattcctaaactggaagagatgcagaaggatggagaagaaggcagaaagaaaattcaggaatacacccgatataccactgtaggacttgcgctgctggaatcaagtgccatggcaattggttttggacgtcagggacttcttctggattacaatgcatggaacgtgatcgtagcgatcatcactatgacaacaggaagtgcactgttaatgtggatcggtgagcagatcactgacaagggtgtaggaaatggtatttccatcgtgcttctgtttaacatcctgtcaagtgttcccgatgatatgagaagcctttactatcgttttatatttggtcagtccttcgcaacaatggctgtagcagtattactgatcgcagtagttctcttagctatggtagtctttgtagtcgttttaaacgatgcagagagaaggattccagttcagtattccaaaaagatggtaggacgcaagatggttggtggtcaggctaccaacattccgttaaaggtcaacaccgcaggtgttatgccggttatcttcgcatcttccattatgtctttccctgttgtaattgctcagttctttactgttgattacagctctatcggtggaaagatcttaacaatgctgaattccggctcatggtgcaaaccatcccagccaatctattctatcggtttgataatttatatcgtactgttgttcgtgtttgcatacttctatacatcgattacctttaatccgttggaagttgctaacaatatgaagaagcagggaggcttcattcccggcattcgtcccggcaagcccaccagcgattatttaaataagattttgaattatattgttttcattggtgcagttggccttacagtagtagcgatcgtcccgatccttgcatccggacttttagatgtgagccgtatctcattttcaggtacctcactgatcattattgtaggcgtagtactggagacaattaaagcagtagaatctcagatgcttgtgcgttattataagggatttttgaacgattaacacaacagttggatcagtcaatctgcctttgtggtattccacaagggcggatttattgcgttataggacttttttgagaggagaaaaacttttcatgaagatcatcatgttaggagctccgggcgcaggaaaaggcacccaggcaaagaaaattgcagctaagtacagtattccacacgtttccacaggagacattttcagagcgaatattaaaaacggaacagaactgggcatgaaggctaagtctttcatggacgcaggcggtcttgtaccggatgagatcacgattggaatgctgttagaccgtatccatgaagcagactgcgtaaacggatatgtactggatggtttcccaagaacgatccctcaggcagaaagtcttacaaaagcgttaagcgaaagaggcgaagcagttgattatgcagtaaacgtagatgtaccagatgagaacatcatcaaccgtatgtccggacgtcgtgcatgcttaaactgtggcgctacctatcatattgtttacaatccttccaagaaagaaggaatctgtgatacctgcggacagcagctggtattaagagacgatgacaagcctgaaactgtaaagaagagactgtctgtatatcatgatcagacacagcctctgatcgactattataagaatgaaggcattctggcagaagtagacggaacaaaagacatggaagaagtattccaggatattgttaatattttaggagcataaaaaatggtaacgatcaaatcagaacgggaaattgaattaatgcgggaagccggaaagatcctggcaaaagttcatgaggaactgggcaaggtagtaagaccgggaatttccaccaaggaaatcgaccgcatctgtgaagagatgatccgcagctatggctgcatcccatctttcctcggttatgaaggatatcctgcttctgtatgtatctctattaatgatgaagtcgttcacggcattccaaataagcaccgttacttaaatgaaggtgacattgtaagccttgacaccggagtcatctggaagggatatcagtcagacgcagcaagaactcacatgatcggagaggtaactcctcaggccagaaagctggttgaagtaactcagcagagcttctttgaaggaataaagtttgcaaaagctggcaatcatctctatgatatctcagcagcaatccagaaatatgcagaaagcttcggtttcggagttgtaagagatctggttggacatggtattggaaccgatatgcatgaagaaccggagatccccaacttcgcacagaagagaaaaggcatcaagctggcagccggtatgacactggcaattgaaccaatgatcactgcaggccgttacgatgtagcctggatggacgacggctggaccgttgtaacagaagatggttcacttgcttcccattatgaaaacaccatcctgatcacggatggagaacctgagatcttatctttgtaacaccccataagcattaggagggaaagaatatgtccaaagcagacgtaattgaaattgaaggaaccgtagtagagaagctgccaaacgcaatgttccaggttgaactggaaaatggccatcaggttctggcacatatcagcggaaaactccgtatgaattacattcgcattcttccaggcgataaagtaactttggaaatgtctccatacgacctttccaagggcagaatcatctggagagataaataaaaataatttaaaaatagatcaaaaaaagacttgcattaccaaaaaatatttgatataatgctttagcaactttgttggtctatagaaaggagaattactgtgaaggttagatcatccgttaagccgatctgcgaaaagtgcaagatcattaaaagaaaaggcagtatcagagtaatttgcgaaaatccaaagcataaacagagacaaggttaattatttttaggaggtgtactacacacatggctcgtatttcaggtgttgacttaccaagagaaaaacgtgttgagatcggtcttacttacatctacggaattggtagagcaagctccaaccgcatcttagcagaagctggcgtaaacccagacactcgcgttaaggatttaaccgatgatgaggttaaaaagctggctagcatcatcgctgacactcagactgtagaaggtgatcttcgtagagagatcgcaatgaacatcaagagacttcaggaaattggatgctacagaggaatccgtcatagaaagagcctgccggttcgcggacagaaaacaaagaccaacgcgagaacctgcaagggtccaagaaaaacggtagcaaataagaagaagtaatttagtaacatggtaaccgaattcgatttgtatgttttaaaaacaggagagcgaattcaagtaaatgagaaagtaggttagtttaaaatggctaaaaaagtgtccactacagcaaaaaaagtgacaaaaaagcgtgtaaagaaaaacgttgaacgcggacaggcacatatccagtcatcttttaataacacaatcgttacattaactgatgcgcagggtaacgctttatcatgggcaagtgccggtggtctgggatttagaggttcaaggaaatctactccttatgcagctcagatggcagcagaaactgctacaaaggcagctcttgtacatggcttaaagtcagtagacgttatggttaaaggacctggttcaggtcgtgaagcagcaatccgtgcccttcaggcatgtggtctggaagtaaccagcatcaaggatgtaaccccagttccacacaacggatgccgtccaccaaagcgtagaagagtctgattgatttaattaggaggtaattaaagtggcagtagatagagttcctgttcttaaaagatgcagatccctcggtatggatccaatctatttaggaattgataaaaaatctaacagagaatctaaaagagcaaacaagaagttaagtgaatatggcatgcagttaagagaaaagcagaaagctaaattcatttacggcgtattagagaaacctttccgtaactactacgcaaaggcttccaagatgaacggtatggttggtaccaacctgatgatccttcttgagtgccgtctggacaacgttctgttccgtatgggatttggacgtacacgtaaagaaaccagacagatcgttgatcacaagcacgttctggttaatggcaagcaggtaaacatcccatcttaccaggttaaggctggcgatgtaatcgagatcaaagagaagttcaaatctgctcagagatacaaagacattctggaagtaaccgctggtcgtatggttcctgcatggctggagtctgatcaggaaaatctgcgcggtaccgttaaggaactgccaaccagagatgaaattgatgttccagtaaatgagatgcttatcgtcgagttgtactccaaataatccatcaatatatgaaagattgaaaagtatgcctgtcttattttggacaggtatactttgctggatttaaccctcgatatttgatagaaacccaaaaaggaggggctattagtgttcgattttgaaaaaccaaacattgaaatcgcagagatttcagaagacaagagatacggcaagtttgtagttgaaccacttgaaagaggttacggtactacactgggcaattccctgagaagaattatgctttcttctttacccggagccgcagtgagtcaggtaaaaatcgatggcgttttgcatgagttcagttctattccaggtgttaaggaagatgtaactgagatcattatgaacatcaaaagcttagcgatcaagaacaacagcgataccgatgaaccgaaggttgcatacattgagtttgaaggcgaaggcgtgattacagctgctgatattcaggcagatgctgatatcgagatcatgaatccggatcaggtaatcgcaactttaagcggcggcgctgacagcaagttctatatggaactgactatcaccaagggccgtggatatgtaagcgctgacaagaacaagaatgcagatcttccaattggtgtgatcgcagttgattctatctatactccagttgagcgtgttaatatggctgttgccaacacccgtgttggacagcagacagactatgacaagctgactctggaaatttatactaacggcaccctggctcctgatgaagcagtcagccttgctgcaaaggtattaagcgagcatctgaatcttttcattgacctttctgaaaatgccaagaccgctgagatcatggtagagaaagaagacaatgagaaagaaaaagtacttgagatgaacatcgacgaactggaactttctgttcgttcttacaattgtctgaagagagccggaatcaatacggtagaagaactgtgcaacagaacttctgaggatatgatgaaggttcgtaaccttggccgtaagtccttagaggaagtacttgccaagttaaaagaattaggcttacagctgaatcctagtgacgaagcataagttatgattgaaagctgtgggaagtccccacataaccttagccagtaagtccaatgaagcatggcgcgggttgccactataaaaaataaacaggtgggtaagatgcgcctctaccagtaagtccgatgatgcatggaaaggtgttccaccgatcaggaggaaagaataatggcaggatatagaaaattaggaagaacatccaatcagagaaaggctatgatcagaagccaggtaactgcactgttatatcatggtcacatcaaaacaactgaaaccagagcaaaagagatccgcaaagttgctgagggtctgatcgcactggctgttaaggaaaaagataacttcgagactgtaaaggttactgctaaggttgctcgtaaagatgcaaacggcaagcgcgttaaagaagtagtagacggcaagaaagtaactgtttacgatgaagttgagaaggaaatcaagaaggacagcgcttccagacttcacgctagaagacagatgttaaaggttctttacggtgtaactgaggttcctacccaggcagctggaaagaagaacggcaccaagtctgttgatctggtagctaagttatttgatgaagttgctcctaagtacgttagccgcaatggtggttacaccagaatcgttaagatcggccagcgtaagggcgatgcagctatggaagttctgcttgagttagtttaatcattaacttatattgatctgaatatagttatgcaggcgactgcaggtactgtcaaaggtatctgcagtcttttttttgcggattttgtgagcgatgctgtattccgtcagaggtttgaaagaatatcgtaagttgataaaacccatatcctgctttataatgaaagtacaaaatggaggagggtatggcttatgttgaatttaaaaagaatggtatgtatgctgctgacagcagggatgtttactaccgcacttcctgttcaggcactggcagcatctgactatcagtatattacgaatatttccctgaaagtagaagttgacctggatgcaggagatgaggtcaacagcggtgacagtgtaggaacatccaaagatgattccggaacaaaggtttatactacatcagacaaatacagtgtagagtctgctgaatggaccaataataaagatgtgtctatcggagatactccaaagatcactgtatggctggaaccagactcttcatccagctcaaagtatgaatacagatttcgcagtagctatggctcaagcaaggtaagcatcagcggcggtgaatttgtatcctgcagtaagagcggcagcagtttaaaagtggttcttcgtgtcaatggggtaaagggcacttatgaagcaccaaaggaagctgaatggggaagcggaaaaggaaaagcaacctggaaagcaccagatgataagaccggttattatgatgtgatcttatataagggttccacagttatgaagaaactggaagattacaatggtacttcttacaatttctatccttatatgacaaaagaaggagattatacctttaaagtacgtactgttcctcatacagatgagcagaagcgctatggtaagaagagtgaatggaccgagtcagacagcaagtatattgatgaagatgatgtatcagatggctctggacaggacaacagttccaatggaagtaacagcggtggtatcacccctggaggcggtactacggatgctggctggaaacaggataacaacgactggtattttaaatacccggatggcaattatgtaaagaataactggctgcagtggaataataaatggtatctctttgataacagcggaaagatgctgaaaggctggcagcagaaagataatcactggtattattttgacaccactaatggcggtatgagaactggctgggtaaaagaaggtgacaagtggtactacttaaatccaaaccagggtggtccggaaggtgccatgatctccaactgctggctgaccatcagcggaaagacttatttcatcaaccagtccggtgtgatgatggaaggctggtatcagatttccggtaaatggtattacttctatccgggagatggctccaaggctgtaagtacttctattggaggctttcaggtagatgcagatggtgtatggaaccattaaaatataaaaaataaatcatacgtatatacgaaaaagctgcctgaaaaggtggctttttcttgacttatactatgatatcatctacaattgtgacagctgtgggagtgccaaaggcacgtagcagctgacttttttatcaacaacatcactttgaaaggaacgtcatgggaattataaaaacagccagactgatctacgaatatatcagaagagatgaagaagagaaaatagaagaagtaaagcgtgccatagacggtgttgacctggatatagaaaagggaagttttgtggcagttttaggacataatggttccggaaaatctacttttgcaaagcacatcaatggtcttctccttccaacagaaggtactgtatgggtgggtgagatggataccaaagatgaagaacacatctgggatgtgcgcaaaacagcaggaatggtgttccagaacccggataaccagatcattggaaatattgtagaagaagatgtaggtttcggaccggaaaatattggtgtggaaacaaaagagatctggaagcgggtagatgaaagcctgaaagcagtagggatgacggcatacagaaaacagtctcccaacaagctgtccggcggtcagaaacagagagttgccattgccggtgttatggccatgcgtcctcagtgtattattttagatgaacctactgccatgttggacccaaatggacgaaaagatgtaatacgcacggttcatgaactgaataaaaaagaaggaattacagtccttcttattactcattatatggaagaagccattgatgcagaccgtgtgatcgttatggacgacggaaaagtgatcatggatggaataccaaaagaaatcttttcccgtgtgaaggaattaaaggaacatggactggatgtacctcaggcaacagaactggcatttgagttaaaagaagcaggaatgcctttgacagaggggatcttaagcagacaggagctggtagaacagcttacagcgttgctttcagatgaaaaataggagaataacatgtcgataaaagcagttgatctgaattatgtatacggaaatggtacggcctttgagcagcatgccctttttgatgtgaatttcgagatccaggacggggagtttgtaggcattatcggacataccggttccggaaaatccacattgatccagcatttaaacggactgatcaaggccagctccggcgctttgtattataatggagaaaatatttacgaagataaatatgatatgaaaaagcttcgttccaaggtaggactggtatttcagtacccggaacaccagctttttgagatcgatgtactgacagatgtatgtttcggaccgaaaaaccagggattttctgaagaagaagcaaaggaaaaggcgaaaaaagctttaagtctggtaggcctgggtgagtcttattacagccagtcaccatttgaactgtccggtggtcagaagcgaagagttgccatagcaggtgtgcttgcaatggagccggaagtcctgatcttagatgaaccaacagcaggtcttgacccgcgaggaagggatgagatcttagaccagatctcaaagctgcatacagagcggaagatgactattatcctggtatcccacagtatggaagatgttgccagatatgcaggcagactgatcgttatgaaccatggacagaaagtgtttgacggaactccaagagaagtattccgccattataaagaactggaagccattggtctggcagcgcctcaggtaacttatctggtccatgatctgaaagaaaaaggactggatattgacagtgatattactacagtggcagaagcaaaagaggcgatcctggcattgtgggataaaaagagaaagcggcaggtataaaaatgctgagagatataacattaggacaatattatccggtggattccctgatccatcgtctggatccaagaaccaaactttttgggacaatggtgtttatcctgtccctttttgtggcaaataatatatggggatatttattagggaccatagcactggctgctgtgatcgtactgacaaaagttccggtgcgttttatcttaaagggattaaaagccattgtgatcttattactgatcagtgtcagttttaatctgttccttacaccgggacgcgaactggtacgtttctggatctttaagatcacctgggaaggaatccgccttgcaggttttatggcagtgcgcctgatctacctggtagtaggttcttcccttatgacattgactaccactccgaaccagctgacagatggtctggaaaagggattgggatttttaaagcggttccatgtaccggtacatgagatctctatgatgatgtctattgcactgcgttttattcctattttagtagaggaaacagacaagatcatgaaggcccagatggcaaggggcgctgattttgagtctggaaatctggtacagaaagcaaaagccatgatcccgctgttagtaccgttatttatctctgctttccgcagagcaacagacctggcaatggcaatggaggcaagatgttaccgcggcggcgaaggaaggaccaagatgaaaccgttgcagtacagccagaaagactatgaggcatatatggtctttgcactgtattttgtgctgatcattgcttccagggtttatctgtaaatgtatcctgtatacaataaaagataagaaacagtataagcagtaaaatatatgggacgcaggaaagtataaggagaaaagaaacatgaaaaaaagggtccttctgagagtggcctatgacgggaccaactatcacggctggcaggtacagccgggagcagtgaccattgaacaggtgttaaatgaaaaactgacagagcttttaggggaacctattgaagtgatcggagccagccgcacagactccggcgttcatgcgatgggaaatgtggcagtatttgacacagaacaccgtatgcctgcggacaagatctgtttcgctttaaaccagcggctcccggaagacatccgcattcagtcatctatggaagtggaaccggactggcatccgagaaaacatcactgtatcaagacatatgaatacaaaatattaaaccgcaagatggaagtaccgtccctgcgtctgtacacccatttctgccattttgacttagacctggatcagatgcgccaggctgccaaactgctgacaggagaacatgattataaaagtttctgcaatgttcgtacccaggtattagatactgtgcgtactgtatacagtattgatatagaaaaagacagtaatgatgtgatcaccatacgggtacggggaaacggcttcctttataatatggtccgcatccttgcaggaacccttatggcagtgggaatgggccagagaaaaccggaggaaatgccggatatccttgcagcctgtgaccgggcggcggcaggtccaacagcgcctgcaaaaggtctgatgttagtgggaatggaatatcaggattaaaaatggaaaaatccttgaaaatataaggatttagccaagaaaatggcttgacatggcaaaacagatattatataataagaaactgtgacgttgagagtaaatgctcatccaaagccccggagcggagcatttcattgataaatacttcccaatatttatcacatatagcgatcatctgaaaagatgtaatttaggttgaaattaacaggaggttaaccaatgaagagttttatggctagtccagcgacaattgagagaaaatggtacgtagttgatgctacaggttatacattaggacgtttatcatctgaggtagctaaagttttaagaggaaagaataagccaatctttaccccacacattgactgtggtgattatgtgatcgtagttaatgctgataaggtaaaagttaccggcaagaagttagatcagaaagtatattacaaccactctgattacgtaggtggcatgagagaaaccactctgcgtgaaatgatggctaagaagcctgagaaggttgttgagttagcagttaagggtatgcttccaaagggacctctgggaagaagcatgtttacaaagcttcatgtatatgcaggcccagagcatgagcaggcagcacagaaaccagaagttttaacattttaatgaggatcggaggaagaaagtatcatggctagcgcaaaattttacggaacaggcagaagaaaaaaatctatcgccagagtatatttagtaccaggtacaggtaatatcaccatcaacaagagagacatcgatgaatatcttggtcttgaaactttaaagctgatcgttcgtcagccattagttgcaactgagacagttgacaagttcgatgtattagtaaacgttcgcggcggcggcacaacaggacaggctggtgcaatccgtcacggtatctccagagcacttcttcaggcagacgctgattacagaccagttctgaagaaagcaggtttcttaaccagagacccaagaatgaaggaaagaaagaagtacggtctcaaggcagcccgtagagcacctcagttcagcaagagataatctgctgttcaaaccgtatcaaaatgggtcaaaaaccccggaaaatcaaggttttccggggttttactgtatctaaacgggctgatatagtttgacctaatttaacaaaacgagagccgttttcacccaatttttagtggtccgcaagtggttaaccggcccaaaagagggcaaaaagagggtcaagtggtgcccaaagtggttaaccgagagccgatttttgggggtgttttggggtcgcttttcagccctttgtcccctcgttttggtctgtggcagtttgacatagtttgacctaatttgaataattgaatatgaatttgatacagcactcagtgtaaaatgactgggtgcttttttcatttcaggacctcgtattccggcgatagaaagagccgtcactt

SEQ ID NO: 3534 - DNA, 177463 bp, Unknown
  gut microbiota DNA sequence
acagggcttaggtgggtgttttttgtctttgcggtatatatcaaaaatgtatgatttttaaatcatttattttcttgacatcacaccgctggacttaaccggcctgttttacagataatgaggtgtgtttggtgtcagcacttcacaaccatcctctgtaatcagcaccatatcctcaatgttaaaaccatttacaccgtcaatgtagcaaggtacttccattgccagtatcattcctgcctccagaggtcttgtctcggaagcattgatgtaaggcgcctcagctgtcgccggtcccatactgatggagtgtccctgatgacctctccgatagcaggggaacatctcttttacataatcatatgcagtgtgatacaattcattgataggaaggcctggttttgccgccgcaatcattctgcgctgtccttcgtaaagacgatcctttaattttaacaatgccgggtcgccgtttccgattatccatgctctggaggtatctgtggtatagaaatcaaattctgcattgacacctgcatcaaatttcaccacatccccgtcttttacaactccgtctcccggcagtgtcagccttgcgctggatgggcctgtggagaacatagaccaggagcttggagcacagaatccggactttattacatcttcccggaagcactgaaccaattcacgctcagacacaccgattttcgcaattttgcttacctctgtaaaaccatgatctgcaatgcggcacagcttccggaacatttcaatctcgtccggctgttttacgctgcgggcataaacaaacaaatcagaaatatttacaaattccgcttccgggaacttttcagtcagactcttatagtaaggaactggaaggtaatccagctctatgccaacctttttgttcgccagatcgcaggccttcataaactgaaccagcttatccatggagctttccatagctgttttatccggcacaactgctccgtgggcaatctcatcccaggtttttaagccaacccaggtatcataagggtctaccacaaaattcagtcccgcagccttaatacggaatgtggcagcctcaaagtccatcgttgtcagatgggtgggcaccttgtcatcagcccgcataacagccagggtaaatcctggctgtctggatacggtatgctgatggccgccgaatcctgttacataatgaaaattctccggagaggacacgatcgctccatccaatcctttttcgcgaagcagttccttaattctatattcctttggtctcatttgttttccccttctccttcaaccatcagttagttattcattaatagaacatcggtgaaccaggtcctaacggaagtcccagtacataccatacgcagaacatgataatccagccaattaaaaatgccagtgagtaaggaagcatggtagaaataacacttccgattcctgccttcttgtcatacttctggaagaatgctacagtcaatacgaagaatggcatcagcggagcaatgatgttggtactggaatcgccgatacgataagctacctgggtaagttccggagaataacccagacgcatgaacattggaacgaaaatcggtgccataatagcccattttgcagagtcaactgcaataaagatattgataaatgcggtcagtacgatatagcaaatgattaatggcagtcctgtgaagccaacagactttaagaaatcggcgcctgcaacggaaatgatggttcccaggtttgaatagttaaagcatgcagtaaactgagctgcgaagaaaatcagaaccatgaagctggaaagaccgctgatggtcttgttcatcagttccactacatctttgtcattcttgataacgccagcgccgataccataagcaaggcccggaagcaggaacagcagcatcatgaagaaaatgattccgctcatgaacggggagcttaaaaatgcgtgtgtttccggatttcttaaaagtccgttctgcggtacaactaacattgccataattgctatataaaccagcgccgtaattcctgcccagcgcataccgcgcttctcattctcaccgatatcctgaacctgctcagaagcatccggtacataaggagccagacgtggctcaatgattttatctgtaacaaaggttccgataatggtgatcaggaatgtagatgctatcatgaaataccagttacatacaggaagtacattgtagtttggatcgatcatctgagctgcctgtgtggacataccagcaaacatggggtcattggttccgatcaaaaggtttgcactccatccgccggatacacctgcaaaggctgctgcaagacctgcgattggatgacggccgaatgccataaataaaactgcgcccaatggcaccagaactacatatccggtagaagatgcgatgttggacataattcctaagaataccacaacagctgtcacaaatgcctttggagtggaagcagccaccttcctcagcaatgcagacataaatccggttccgtccgctacgcctacaccgatcatgatggtgaatacagttccaagtgcgaagaatccggtaaagtttccaactacggttgttaccatgtgacggatgctgtcaggtgccagaaggctgactgcagcaacggttttctgggtgatttctccctttgagctgtccaggaaatcatatgtaaccgatacaccacaagccgcacagattgcggacagtacgattacaactcccgtcaaaatcaggaaaatcgttgcagggttgggcagagcatttcccacatgctccacagtgtccagtgcccgcagcacaaagcctttcttcttttcttttgccattttttttccctccattatacttactttgcttccctataacgcttccacagcagcacgaagctgctctaaagcctgttttaaaacacttctgggacatgctgcgttaagacgcatataaccggaaagacttcttccgaatgtgtatccatcgcttaatcccaagccagctttctctaccataaaacggctcagctcttcattgctcattcccagctcccggcaatccagccataccagataggtagcgtccggaacattgggatgaatctgaggaatgtatttctcacagtaatccttgataaaatcaaagttgtcggaaatatataccagaagctgctccagccattcctctccttcattaaatgctgtctccatcgcaacggaactaacggcattgttgcggtgaatatccagattcatccagaacctgtcatacttcgccttcaactccatattagggaagataaccgctgacgcctgcaggcccgccatgttgaaggtttttgttccggaaatacagctgatcacgttggctgcgatttccggcgacagcgttgccgtcggaatatgcttctttccatgaaaaaccaaatcggaatgaatctcatctgatacgatcaacacatgatttttaatgcagatctcgcataatctggtaagcagctctctctcccatacaattccaaggggattgtgaggactgcacaggaaaaatattttcgcctgttttaccttctcctcaaaatcctcaaaatcaacactccagttcccatccgtctcaaccagcgggctttcaactacttctctgccccagccctctgtcacatcataaaactcggagtaaaccggtgtctggatcagcaccttatctcctggctctgtaaaaacctccactatagaagataatgtaggtactacgccaaggctgaaactgattttagacttgtcgatctcccagccattgcggcgtttctgccaaccgcagactgcctcataataagaagccggtctggaggtgtagccccagattccttcctctgcttttgcctttacggcatcaataatgggctgcgccgtcttaaagtccatgtctgcgatccacagcggaatcacatcttttcttccaaacttcttttctctctcgtcatatttggcggagcggtttttgctccggtcaatgacctcgtcaaaattgtatttcacttctctcctttcctgccggagccctgcagtgctctgcgacattcctctttcattttacagcccgtttcctttcgggccgctgcttatttatatagcaagattcatgccaattctgaaaagcacgcattttccccatttctttttgcttccgcttccaaaacgcatgttttaattggtcatttggttatttggttattttcccacattttttgaccagtttctgtgatgcggctgccgcctcttccccggctcacggtggcaaaacccttttgcgccatcaatgccaaaatatctcgtattttcttctgtgacagtgcaacattctgctgtcttgccgtttccagtatcatctccctgccggcaggatgcccctctttttccgccttataaagcagtcccagcacaaaccagaaagccggactgtaccgggaatcattttttgctaagtcccggtttcgtactgccggtttttcctgtcccgccagacgcagaaaggttactggcaaatcctcacgcttaatcacattttctcctgtaaaacacagatactctaccacattctgaagctcccggatatttccgggccaggaataacgaaacaggagctgtctcacctcagtagacagtgaaaattctccgcctgcacatctgcggaaatgctccaaaagcagctgtatgtccccctcccgttcccgcagcggcggtatgaggaccggaagtgtgctcagccggtaatacagatccctgcggaaacttccgttctccacccgctcctccaggctctcatttgtggccgccacaatacgcacgttcacattaatgatctgatttccgcctacacgcatgatttccctctcctgcaaaacgcgcagaagctttacctgcatggccatgctcattccctcgacctcatccagaaacagagttccctcatgggcgaactcaaaaaggccgggacggcctccttttttggccccggtaaaagcaccttcctcataaccaaaaagctcgctttccagaagattttccggcatggcggctacattgatggccacaaaagggccatctctgcggctggaggccagatgaactgcgtgagcaaaaatttcctttccagttcctgtctctccgattaaaagtatgggagattccgtctgggccatgctctttaagatcgttttggttttctcaatggcctgggattttccgactacatcctcaaaattatacttcgcccggtatcccttggttcgcagctgacttcgcagctcattttgctttttttccagctcgcttaatggctgaagggtggaaaaagcgccgatacatcggccgccccgcataaccggaaccactgtcatattgatatttgccgcattaatacggatcaggcgctccagaacctgcgtctgttcacggatacatttttcaaaaggaatatatggaaaaatctgttccgccggccgccccaaaagcatcctgatcttcatacctgtaataaccctggctttctgattacaggcaaaaattttccctttttcattaacgccgatcacgccctcatccagaatttccagaagaagatccaactgactctccagatttctggagcgctggaacatctgctcaaagctgtaatttccggaagccatagagtgaatataattctggaattttttttcttccattacactctctaatcccagtcgcaaagcagtctcaatcatggtgtttgcagtacagggacgatgaccgatattgatgacctgctccatccctgcaggaacaaaatccatctcatccggcgttaccgccagctttacattctccggcaccacatcatccccaaaagtcggttccatcgtaaatacatccggcccgtaaggaatgaattgaagctgattcacacctgactgctctaattgcgtaatggcctctctggccatctggtgcgtaacattgacaaacagcaccctggttcctgccggaatctccttcagtctgcgaatcacctccttggaatatcctacatatatttccaccacctgcccgtctgccggcacatactggctctcctcctccgctatcttaaaagcatccgtagaaaccagatataaatccgttcttgttatcttttccaccgattggtcacttgtactgtaggaataaacctccaccagatcgccaaacagttcccttatctgcccggcatagcactgactggctcccggaaacagcgtcacaaccgaaatactcttcttcatatattttccccctaattcagcgctccctgcatctgcgcctgttctcatcaaacagccgccccttgttatactgataataccgcccacactcaaactggtttaaaatgctgcactggcctcattccgttttaattaggtgacgaaaataatcatttcctgaccatttccacaggcggtcttatatactgacaccattataaaaaacttcgcgtcactttgcaacctgccactgatgtcctattttctgagtgatggagagataaaaaaatgctaagccataggttttaatccttggcttagcaccatattttactattcaactctgaaagtcaggttctataacactatgtgagattttgtgttgacctgatttctatttaaacatatccaagtaatcccggcagccacatggacaggatcggaacataggttactaacagcagtacgataaagatcgctacaaagtaaaccaacagctgtttaataacattttcaatcttggtctggccaaccttaacacctacaaacagggtagttcctacaggaggtgtaatggtaccgatacacaggttgaagatcatcatgataccaaagtgaacggtattcattccaagctgctggcagatcggcaggaagattggagtgaagatcaggcaggctggtgtcatatccatgaaagtaccgatgatcagcagcaggatgttgacgatgaacagaatcacataacggttgtcactgatgcttaacatagcagtggaaactgccttcgggatctcagtaaatgccattacccagctcatgatactggaaacaccgatcaggaaaatgatgataccagtcatttccgcactgtcaaggaagatctttggcagctcagaaaccttaatggagcggtagaagaacagggaaaggatcaggctgtatacaacggctacaacgcttccctctgttgcggtaaagataccggaaataataccgccgattacaatgatgatcattaacagacatggaatagcctggaaaaatactttgatcttttcactgtttgtaaatctctttgtgcttgcgtaacctttcttcttagcgaaaatatagataacaatcatgcaggcaagtccccagaggataccaggaatataaccagccatgaacaatgctgctacagatgtaccgccgctgaccagagaataagtgatcataacgttgcttggcgggatcagaagtcctgtaggagcagttgcaatgtttgctgctgcggagaaatcacggtcataaccttcttcttcctcaataggtccgataatagaacccatagcggaagctgctgctgtaccagaaccggagatcgcgccaaacagcatgtttgctactgcgtttgtatgtgctaaagctccagggatccttcctgtaaacagtttagcgaagttgatcagacggatggcaataccgcccttgttcatcaggttaccagcaagaataaagaaaggaattgccagtaagctgaatacggaaataccggagaaaattctctgtgcgccggtcaatacggctgcgcctgtatttaaaacagggagaatagctgcaatggaggaaactgccagagcaactgcaataggaactcctgcaagaagcatgatcacaaggagcaccaggataataaggccacaggtaactgctatactactcataatctaacttcccccttctcatcaaagttcttcttggaaacctggatcgcgttcataacactgaagatcatgatcagaacaccggtaaccggtacgatcacgtaaatatatcccataggaacgcgcagagaagcggtagtctgaatcatggtcagcttggtaatggagataccgccatataccagcacaacagctgccagagcaaaggttaaagcgtcaatgcaaagctctaatacttttcttgcaggaccggtaagcttatctgctaaaaagcccattctcatgtggtctctctttccaaacacataagcagaagcaagaagagccatccatgtaaagctgtatgttaaaagttcctcagatacagtacttggcttattgaagaaataacgggtcacgatctggtaagtaccaataacggtcataaaggcaaacaggaaaatgataacgatactaagaacgcgcatgatccctgctttgattttcagcattgtttccattctactgtcctccctttgctttttcgtttgcttcctggatgtggttatagaaatccacgatcttcggattttcctgtaacatcttctcgtgaagaggaagcactttctgcttaaatgcgtttacatctacatcaatgaactgaacgcccatctgattaatggcaatgtcctttgcttcttcaatgctcttgtcccactcagccatctcaacttcagtggaaacagcagcagcctctttaaatacctgatattcttccgggcttaagccgtttaagaactttaagttggcaaccagcatatccggtaccatctgatgtttattataagagtaatacttagctacttcaccgtgcttattgttggtcagtgccagctcattgttctcagcaccatcaataacgccctgctggatcgctgtataaacttcaccaaagctcataggagctgcagctgcgccaaatgcatttaccatggcaacacttgccgggctctgctgtacacggatcttcataccctttaagtcatctggagtgttgatcggcttcttgccatagaagtttctggttcctgcattataccaggtaactacacggaagcctgcttcgtctgtagactcatagatcttttccatgtaatccgtatcctgcataacggacttgtaaacgtcctcagagtcaaacagatatggcatactgaaaatctcataaacacttgcgaaagtctccagatttgcagtacctgctactacgaagtcgatcgcaccggtctgagtcagctcgatcgctttctgcgcggaacccagaagctcatttgggaagatctggacttcatacttatctcctaagcgttcctcaacatacttcttaaatgccagaagtcccagatgctccggatgtgtttctgactgggcatgtgaaatacggacaatgcgctttccggaagttacagaaccgcagccggtaagaccagcaacaacggctgcagccagcacacaggctgacagttttttaactaatttcctaaccatcattttccctttctttatacactacgtgatattttttccttcctgaaaaacacaaatcccccaggtttttaaggaaggagttaatttattaacacttcattaacaccttccccattatataacctgagggtcttcctttgtaccgtaaatacttgtcattgaggtggaaaatcttgtccaaaaatacgtacaatgacaactttgtcctgttttgtattagttttatattagttttctatttgccttgtatcaattagcttccctgtattcagacgggatcatgcctgtcacacgcttaaagactttggcaaaatagttggagtcataatatcccaccttcatgcctgcatctttcacactgatatttctgtcttttaacagtcgtttcgcctcattgatgcggaaattcgtaagataagtagtaaaattttgatcaaagcactgcttaaacaacttacagaaataggcatctgagtaattaaactgtctggccgcatcctgcatggagatctcgttcatataattttcccggatataggtgcgtatcttctcagctacctggttcacccgttctgtttccgggtctttcggcggctctgcatccgggttccagggccattgctctttccttttttccgcttccttttctgcctctgtcttttcttccccgctgccggaagaatttttcttattttcaactgccttatccgtcaaccgcatggcctcttccataacagctgtcagttcttcttcatcacagggctttaaaagatagtccagggcccgtattactatggcacgttttgcataagaaaattcatcataggcagttaaaaacacgatgatacagtcttcatccatgctgcggatcttctctgccgcttctacaccatttaattccggcatggaaatatccatgataatgatctggctgtgctctttttcatacagctgcactgcctcttttccgttggtagcttcactgatctgtaaaatatctccaaagcgcctcatcaaacgtctggcaagagccatacgctcgatctgttcatcatctgctaaaagcacgcgatacataaactttttcctcccgtctttctctctgatccccaatgcatgtgccctgcattttcgcagttcacacgatatcttttggtgtaaaagccagttgtacggctgttccgcacccttttttactgtaaataaacatttccccatcttcatacagaccatggacccggcggtaaatatttcccacaccaatgccgatctcattttctgtaccgtcatttaacgcagcacggatctgttgtaaacgttcttcttccataccaacacccgtatctgacacagagatccacaaacgttctcctctcatccaggtccttataaagatcctgcctcccttgctctccttggaaaggccgtgtttaatggagttttccaccaaaggctgcaaaacaaaggagggaactaacacatctaacgtttccggtgcacagttcgtatcataccgtactctctggccaaagcgcattttctgcagatacatatagtcctggatgatcttcagttccctctctaaaggcattaccgtacctgctgattttaagttgtaccggaacagacggcttaaagcagtgatcatcttttccgtagccactgcatcttcgatctgtgccgtactggcgatcatatttaaggtattaaataagaaatggggattgatctggctttttaacatctgaagacgcatgtcatttaacttctgctccatggcatgtttttcttccatgtttcggatattttccctggtagacgctttcatacggcaaaattcctgtaccagacggctgatctcatcttctccctctgccactacatccggccctgtaaaatcattatccccaatgcgcactgaatcagctgccagttccacaatcggctttacaatatagcggctggccgtccggttcatctgccgcaccatccagaaagccgccatcccgcagatcagactgcataccggtattaccaccagcatataccgctgtttttcatactggctgcttccgtttcttacagtcagctgttctaactgccccgcctgtcctgccagatatccctggatccggcgcagcctgtacacctcctgcatatccgcttccccaatggtttccttttccatcagttccctgcgaaatctgtcataattttcataaaggttatgcagggtccaagttcttgcataccgttcttttccgatctctttatatttataaggtaattcttccagcatcagttctgtatgtttagcacttttttcccattcctgtctggtttcttttgtctgctcctggataaaccgatcaaacgctgcgctttcttcgtccatagccgtccagaaggcaagacttctggaattgctctttaaaatatttccaaatcctcccagtccgaaaaaagccaccagcatattggcggcaatggaaaggaatacgactgcaccaactgaaaaggtaagatatttcagtttttcctgcagcggcagacagaaccattttttcattccttttctccttctttcacacattccttttcttattttatattaattctctcaatttttaaagataggattgtgtaaaaaaataccccggcatatgatcctctctgccggagtaacaataaatcatatctgactatagtggctggtccttgtctgatggtacataagtagcaatgtcttcgatctgacatccaagtatcctgcatagatcattcacagttttcatagaaatatcctgattatgctttaatcgatacaacgtactgcttgacatatgatacttctttgtcagtgtataccagttttcttctgatatttccagtgttttccaaaacggtgaatagtcgatcatcttatgctttctcctgtaaccccttgataggtcaagcataagttagattttacatcttgaatatcttcgtaataacgaatatactataggtattacagtgcctaaaaagggcatatcgggaggtgttatatgagctggtacacagaggaagaaattgaaaaattactggaagacgaagaactgaggaaacgcattgcacgctttgttaccatgagcggggaagaatttttcgatgaagtgtacacccatctctcagcggaagaactggaagaatatctggaagaaaaccccagtgaacgaaaatatctaaaacgttatgaaccataaaaaacgataaaagcccaaagaaggaaggtctgtcaaatgacaaaccttccttcttccggttcttcttcaaaataatctttataatccacctcaatggcatggcgcatacgcttcatgctgaaataaaggtgatctttcagtgctttttccagacctttttcgtccttttcgcaaatcaggcggaaaatttcttcatgctctcctgtgatccgggtaaaatcggtctctgttgtaaaatccaacatcctgaaacgggtataatgaagctgctgtgcctgaagcatatcccacagtttctgcctgcagaccgctccaaaccagatagagtgaagctctgcgtccatatggtaaaactgctccggttcaaatcccggtgtctggatcagggctttctgcatagcaatggcgtgacggatttcttccagggtcataggattttggactttcagaaaatccctcagcaccatggtttccactgccacacgcatgtagatcatctgtttgatgttgtccagacttaacagagtcacataagtacctctgtagggaactgtctctacaaatccctgttcctggagcagccgcaaagcatcccgcaccggggtcctggagaccccgaagcgctcacagatctcattttcactgatcatacgccccggctccagtttcagatctaaaatttctctttttaatgtctcaaatacctgctctccgcggtttttgaaattcatctcactcattcagccaatatcccacctatcttatttaggctgcttgccaatgtaagccaggataccaccgtctacatacagtaccagaccatttacaaagttggaagcgtcagatgccaggaatactgctggaccgcctaagtcttctgcatttccccaacgtcctgcaggagtcttgcttacgataaactggtcaaatggatgtctggaaccgtctggctggatctcacgaagaggtgcagtctgaggagttgcaatgtatccaggtccgataccattacactggatgttatactcgccgtactcagatgcaatgttcttggtcagcatctttaagccgccctttgcagctgcataagcagatacagtctcacgtcctaattcactcatcatagagcagatgttgatgatctttccgtggcccttcttgatcatgctcgggataacagccttggatacgataaatggagcatttaagtctacatcgataacctgtctgaactcagctgcgctcatctcacacattgggatacgcttgatgatacctgcattgtttaccaggatatcgatcacgcctacttctttttcgatctgtgcaactaatgcatttacagcttcttcattggtaacatcgcatacatagccatgagccttgatgccttctgcctcataagcagccagtcccttatctaccagttcctgcttgatatcgttaaatacgatggtagcgccagctcctgccattgcttttgcgatggcaaagccaattccgtaagatgcacctgtgatcagtgctactttgccttccagtgaaaagttgtttaagtaatctgccattttattttcctcctgttttttataattacatcatttcatttggcttcatggtgtccatatcatcaaattccatgttttcgccgcccattgcccagataaatgtataattggaagtgccagctccgctgtggatgctccaggatggactgatcactgcctcttcatttttcataacaatgtgtctggtctctgttggctctcccatcatatggaatacgacattgtcaccaggtacttcaaaatacatataaacttccatacggcgctcatgtgtatgtgccggcatggtgttccatacacttcccggctctaaaacagtcatacccatagaaagctgacaggtctttaatacatccggatggataaactgattgatcacacgtttattggaaagagctgcttcaccacatggtctctttgctgccttttcgatgggaataaaagtagttgtataagaagtatgagccggagcacttaccatataaaattttgccggcttggaagcatcttcactttcaaagtaaacttcttttgttcccttggtaatgtacagacagtctttgtaacccatctcatattcctgtccgtctgcagtgatctttcctttaccgccaatattaaaaataccgatctcacggcgctccaggaaataatgggtaccaaagtttttccagcagtcgatgcccttttcaatagaaaccttctctgtaacaggcatacatcccaatgtaaccatacggtctacatgtgagtacacagcaactacttcatctgcctgatacaaattctggatcagaaattcatttctcagttcttccgttgtgtagcgttttacatctctctgatttgcagaataacgaatgtccatttttgctatctccttcattttacggttgtgttatcttgtatacagttttatgaagttgtatacaagttactttgcttgtatacagattagcaaatatattcccggaaagcaatgggaataatttacaaaataagcatctattttctatgcattatcacaaatcgcattgcaattagacattattttcgctatactgagagaagttgttgtactacccacttacatgagaggaggattttttttgaaaaaaaatattcttgtaggtcagtctggtggccctactgctgtaatcaacgccagtctttatggtatcattaaagaagctgccgcacattctgaacagatcggatctgtttatggtatgatcaatggcatcgagggatttctctccggacatattatggatctttctaaagagctttcagatgaagacctggaacttttacgccttacaccggcagcctaccttggttcctgccgctataagctgcctgaaaatctggatgcttccgtttacacccttctttttgaaaaatttgaacagttaaatattggcgctgttttctatattggcggaaatgactccatggacactgctgataagctttcccgctgggcagctcataataataaggaaatctcttttatcggtgttccgaaaaccatcgataatgatcttcctgttacagaccatactcccggatacggcagcgctgcccgctatgttgcctctacagtccgtgagatcgtactggacgcctccgtttaccagcagccagctgtaaccattgtggaacttatgggacgtcatgcaggctgggtcaccgctgccagcagtcttgcccgcaaattcccgggagacaatccattactgatctatatgccggaagctccttttgaaatggaagaatttttctctgacctggaaaatgctttaaagcagagtaccgctgttgttgtatgtgtctccgaaggtatccgtgacgcgtccggaaaattcatctgcgaatattccaacgaagcacagttagacacctttggccacaaaatgctgaccggctgcggaaagcttcttgaaagctatgtgcgcaaccgttttggtgtaaaagtccgctctgtagagttaaatgtaaatcagcgctgcagcagccttctttcttcccttacagacattaacgaagcagatctggcaggacgcactgctgttaaatgcgctttagagggtgttacaggtaaaatgataacctttaagcgtgcagatggagaggaatacagcctggaatacggtctggtagatgtatgtgatgtgtgcaataaagaaaaaccattcccaactgaatggatcaccggaaacaacaatgatatttcccctgaatttgcaaactatgcactgccactgatgagaggtgtgccggaacatgtatttgaggacggtgtaccgaaatatctgtacagaaagtaatagaattgtgaacatttccccgcttacccagcggggatttttgatgtaaataagaatgtgccttggcacattctcgcaccgagcgcggtcgtttgcgacaaacttcctcatcgcgcgagtgcgcatcgttggcaggtcgtgcctttttgtgtactagggagttccaacggaatttcctagtacataaaaaaacgcagcctcagacagatttttccgcctgaaactgcgtctttaatgggtttccgcccgttaattatttgctcatcttctcaacagcctcaaataaaccattcagataggtagcgcccagtgctctgtcatacagaccatatcctgcgcgtcctgtttcaccccagatcatacgtccgtggtcaggtcttacatagccgtcaaagccgttatctaccagtgccttaacgattccgaacatatcaagggaaccacagctggaaaggtgtgctctctcttcgaaaccattatccagaacagctacgtttcttaagtgtgcaaaatggatacgtcccattgctgcatacttagctgccatctttactacatcgttctttccggagcatcctaaagaacctgtgcacagggtaataccattgtgcttgtcatcaaccagctttaagaaacgatccaggttctcttcgcaggtaatgattcttggaagtccgaaaatgctccagcatggatcatcctcatggatcgccatgtttacgtcacactcagcagctaccgggatcactctctccaggaagtactgtaagttgttccataaatcttcttcgcttaagttgttgtactcagcaacaactgcctttaagccttctcttgtgtagctggaatcccaacctggaagagttaagtcactgtcactgtttaaaggatttacagcgtctacctgctcctgataataaaccagggaagtagatccgtcagccagtacatggtctaactgggttcttgtccagtcaaatacaggcatgaagttgtagcagatacatttaataccagcttcagcaacgcggcggatattttcgcaataattttcaatgtatttatctctggttggcttgcccagcttgatatcctcatgaacagggatactctcgatcacatcaaagccaagtcctgcgtcctcaacctgcttttttaactttgcaatgctctcgcgactccatacttcacctacaggaacatcgtaaactgcagttacgatagactgcatacccgggatctggcggatattctccagagtcaccttgtcatcttctccgtaccatctgaatgataatttcattgaaacttcctcctttaaacattatatatttaagtttttatctaaatcgattgcaaagataataccctgatatctcacacatgtaccatctatattatgaattataccagaacttccgttttcgtccatagtcataattgttgtgcatattgcaaaagttgttcaaaaaatcatgtgacacatgaaccgcaacataaaaaaacaggggatagcaaacactatcccctgaaaaaaatcccatcaaaatcacttcatttttattaaagcatattggcaaatacacctgctatcataacagatgtgatggtaactgtaacgaacccgcctacgatcattggcgcaaacatctgtcccatcagatacttcttctcttcttctgtttctgccagagcattacaggttgactctgtgatgatcgcgttcataggaaatccataaagtgctgtaagtgcggttgcaaagcttaaaccaaatcctgtatgtaagacctttgaaataacaaatacaagagctgccattcctgtaacaccgatcactatgagcaatatcattggtactacgatatttcctaacatttccattgtacagtctttcagtccgtcataaataaacatcatgatcgcaaacatcacgataccataggagttgcacttattcatggaatcttcgtctaaaaatcctatatgagtaaggataacggataagatcagcacccataccagtccactgatactgcctacaaatggaacaggtatcttggcaagcattgtagcgatccatccagtaagtgccagctttgcaaatatcattacattgctgttatatttcgcaggaagcggaggaagcagctttttatgtgccgctgcctttaatgtaccatttacttcatccagctgcacacctgtattctgatatgcagcccctttatttgccctgaactcctttaacatctttcgtccaccaagctgcaggcagaccgctgtaagaggataacctgcaaatccctggatacagtacatggcaatagcaaatacagctgcatcctttagcccctttgcctcagctgcctgctgcatgatcgttgctgccactacaccaccggtcagaggcggaagacctgcaataacaaaactcttatccatcagcatcgggcaaaggaataatgcaagtaccgtcattcccaccagtccgaacatacagataacgatcactttccactgttcagccagctgttttatactgatgatcgttcccatatgggctacctgcaggtagcagcagatagtacttccaaaagggatcaatcctgcattggtaacaagatcgtgtggaaataccgtccagtatcccaaaagcatgaccacagcgcttacaaaaacagacggaacccaggctttggttaaattagaaaccatttcacctataatataagaaacacagcagatcaaaaatgccagcatgaaattatacataaatccccttctttcttgtatgtactcccaaaagcttctcacttaattaagtgcaaaggcttccaggagcatatctgtaaaaataatcatcgaagtgcaaatgacagttctgcacaaactcctaacagtaatgccgattcatccacatcaaaacggctgttatgatgggctgcgccagatcccagatctggatttgcaattcccaaaaatcccaatgcgccaggatatttgtttaaatacttgcaaaaagtttcagaagcaaaccataggccatgttctcctaacacctgaggaccacacatctgtgtcagtttttgtgctgtttcttctacaacttcctgatcattaatgaccggctccatcaaaacctttgtatatggttcaaactccacccggcatccatgtacatctgccacgtttgtacaggtcttcttgatcaacgccagcaccttttctcctgctgggcggctgaaataccgggaagttccactgaaaaatgcctcatccgggatcgcattccagatctcaccagccttctgtacgcagatactgaaggtaagtgtttcctcggcattcatctgattttgtaaagctgaatccaattcacaaacaatatggcttgccgggatcacaggattctttgccagatccggtctggaaccatgtccgctttttccgatcacatgtactccaaaacaaacagcccccgccattctcggtccggaaaccaggttaatctttcctgccggcatgtcattataaacatgaagagcaaagcagtcatcaattggatactcactcaccagttccaatacatgctgataaccatcaagggcttcttccccttcttcaaagcagcaatatactgtaccctttaattgttcacgtacctgagataatacttttatcgttgtcagcatcatagccatatgtgcatcatgaccgcaggcatggcatactccaggtttctgggaaacacacgctttaggctggatcagattatcagtatcttcctttaccggaagagcgtccatatcgcagcggagcagatgatgttttcccggttttccaccttttataattgctaccagccccgtcccggcagccaggcggtactccactcccattttttcaagttcactgatgatcgtcttgcgtgtttcaaattccttatttgacagttccgggttcatatgaaaatatctgcgcattttgatcaggtaatcttcctgctcttttaccagtttaaggatatcaggatcattcattctttcttctcctccctacatttataaagcatcaagtgcctctgcgatccggttcaaagcctcttcaagctgtgctctcgggcatgagaaattaatacgctgaaagccgcctgcttccccattaggcccaaatttaggtccatcatctgttgccacttttgctttatggcacataaaatcccataattcctgatctgtcattccataagccctgaaatccagccagccaagatacgttgcttccggaatacgatatttcacctttggcatccgtttctggataaaatctgctataaactgtgcattaccccgtaaatattcttttaattcttccagccactcctcactttcattataagctgcgatctgtgctaccgcgccgaatgcacccggccataaataatatggctgcattttttcctggaatgctgcacgcatctcatcatttggaataatgatatcagataccagcagtccggctacattaaagcttttagacggtgacgtgcagataatgctgttctgtgcaaatttatcactgatcgttgcaaaagatacaaattccctgtctgtcaggataagatctgaatggatctcatctactacaaccttcacgccattatcaatacaaatatttcccatgcgggtcagctcctcttttgtccaaaggcgtccacttggattttgagggctgcataccaggatcagttttgttttcggatcttttgcctgcatttccaactgctcgaaattcatctcataataaccgtctttatttacaagggcattgtatacaatatgacgtcctgttttattaacataatcatagtaaggataataaaccggagattggatgataacgttatctcccggatccgtgaacagttcaatggcaaatacaagtggaagatttaatcccggtgtatatgtgatccattcttttttaatatcccagtgattacgtcttttctgccagttaacgcaggccatgagaaattcatccgcaagatacccatatccgtaattctcatgagctgcacggtcctggatcgcttttgccactgccggagctgccttaaaatccatatctgcaatacccagtgggatcacatcgctctctccatacatctcctgacgaagcttggatgaccatttaatagacataaccttggtacgatcaatgcaactgtcaaaatcatatttcatacaacatacctgtctgtgctgattctgtaaaacatgtccaatatattagaacaggcgattggaaaatgacagactttcagacacagcacatcctttcctttttctaatgaatgatatataatactgttgttgggtttgcaaactcaatgtataatatattgtactttttctccaatatattgtcaatagataggaggattttttgttttggaaaaaatcaacgaaattgttgccaacaatatagctatattgcgcaaaaaaaatcgtttaagcttagaggaacttggaaaactcagcggagtcagcaaaagtatgctggcactgattgaaaaaggagacggaaatcccactttggggattctctggaagattgccaatggacttggggtaccttttgatgaattaacaagacgaccggacccaatgaaccatgtagttaagatttctgagattgaaccaattcctattgcagatggcactgcaaggaactattctgttttttctgacgataaaaaccgccgtttttctgttttttacctggaaatggacaaagactgccattggaattccgaaccccatttacagggaactattgaattttttactgttacagaaggttctgtgaagattataaatgacggagaagaattcatcctgaacaaaggtgatggtatccaatttcgcggagatgttcctcacagttaccaaaatatagctgactgccaaagtacagcgtacaatattatgtacaatccgtaaaaatatcattatgcattcccgatttttttgtgcctgatattacgtaagtacagaaagattccaagtacaggagggcatttttacgtgaaacagatttccatggatttcaataaacggcaatacatgcgaccggtagattttgaactcttttattataatgatactgagctgcgctctgttgcctctcaccaccatgattactgcgaattttatttttttctggaaggaaatgtcaaataccacatcggtaatgccatatacaaactttcctacggtgactgcctgctgattccaccgggaatcccccattttccggaatttctctcctttgaccagccatatcgccgttttgtgctctggctgaaccggtcttattatgaaaaactccataaacaggatgctgacctgacctattgctttgacactgctgcctctaaccagatctaccgcattcctacggaccgtattacagcccaggatatccagggaaagctgatggatctgttagaggaaaatagttctgagcgtatttttcatgcccaggcaagcgaactgatggctgtgtctttccttgtatacattaaccggctcctttacagcagtctccacgaacattcccaagtatttgaaaatgccctttacttaaaaatatgtgactatatccatcagaatctggaagatgatttaagtctggaacggatcgcagcaaatttttatgtgagcaaataccatattgcccacattttcaaagacaacatgggaatttccctacatcagtatatattaaaaaagcggcttcatgccagccgccaggcgatcctctccggcgaacctatcagccgtatttttccacaatatggttttaaagattacaccagctttttccgtgcttttaaaaaagaatacgggatctcaccgaaagaatacagggagcagcaccggctgatcagaaccgaaccataaatacaaaaaggagtttctatatgaacttacctgactatacaaactgtacactctgtcccagaatgtgccatgtaaaccgcagtgtgaccacaggctactgcggctgctccagtcacatttcagcggccagagccgcccttcataaatgggaggaaccggtgctcagcggaccggaagaagaaccaggcggcagcggcgccgtatttttctccggctgtaccttacgctgctgtttctgccagaactcactactaagcaaagaccattttggtaaaaaactgactgtaaacgaactgggagatgcctttttgcgtcttcaggacaaaggcgcttacaatatcaatctggtaacgcctacccagttttttccagatattattaaagcactggatctggtccgccacaagcttcatatccctgtagtctgcaactgtggcggctatgaacgcccggagatcatttcccagctaaaagattatattaatatctggcttcctgattttaaatattttgacaatgaactggcttttcgctattcaaaagcaaaagattactttgaacaggcctctgcttctatcgcccagatgatccaccagaccggcgcaccagaatatacgctccatccttcctctgtccccggcagaccggattttcccttaatgacgaaaggcgtcattatccgccacatggtccttcccggacataaagatgactctatccggttgctttactggatccaccaacattttccggagcattcctatctgataagtctgttaagccagtacactccttataccaaaaatccggactatccccagctaaaccgccggatcacttcttatgagtataacaaagtagtagatactgccctggagcttggcatgactgacggttttatgcagcaaaaaagcagtgcgaaagaagaatacacaccgccttttaatctggaagggctgtaaaatgacaaaaaacaagacggatatcgaatctttgattaaccacttcgcgattacgatatccgtctcttaactatctcgtccattggactagcctctcttttctgaaacatttgaaactttcgtttctgtttctttctctctatattcagttgtaatcctcattctctttttcttccgctttatttctttacttcttatttatattatatttctttctatctggtattctctctttcgtcctgatcatactttctcgtcatacgaccaaaccgaaaccggattttccaaatctttgtacttttcactttttgatactcttgtggataggttctcaaataagcggtttttaaagatttgaggttgtcctggtttcatttataaatcacgtcttttataaatgaaacaatgttatctttctggcggtccgtacctccttttcttaaattttttcgaaactgattgtctacaatttcttttttatttatttccttcgttcttttgttgtctttaatataccagatatctcgcattttgtcaatactattttaaaattaattctatatttttagcatattagtgaattgtatctattgattacaattatttatatttttaatatattttaatgcttataaacaaatttaaaatgtatattttcagaatatttcaaaaatgctatacagaaacagatgctgtctttatttctgtatagcattttcactcatttacttttcttttccgggagctgataaacacacatcttctaaattagatgccatttccggtcctgttggtcttccaccgctggtaactcccatccgggtgcggatggcgataatatcgtcgatctgctgctgagagagaagtgctttctttcccagaataaaattattcatcatcaggatctttgcataatattccgttgtttccatacgatagtatgcctggattaggctggtgccccaggtgagagccccatgattggctaaaagtactgcattataatttttgcagtaaggtgctatggagtccggcacatctgttgttcccggaagagcaaagtgtgcaagaggcacacatcctaatgccaggatcccttctaccaaaaccggctcatctaagctcataccagcgcatgcaaatgctgtagctgtaagaggatgggcatgaaccacgccctgtacctgtggattttctttaaacacacgaaggtgcattttgatctcgctggaaggcttgtaagtgccttccagtatatttccgtccaaatccattttcacaagcatttcctctgtcataaaacctttggatacgcctgtaggagtagcccagatcgcattatctccaaccttacatgtaatatttccgtcattagatgctacaaagccgctgtggtacagtctacgccccacatccaggatcaggctacgggcctgtgcatctgaaacataatcagtcatttttcttctccttcttaaaattaaatttagaagcagattcccatactcgccagtgctgccagagcaaaagctgcgatcaacgggatcactacggatactacgaacatatccaagtaagattccttatgtgtcatgcctaccagtgccagaacagtaatggttgctccgttatatggaagactgtccagaccacctgcagctacagctgccactctatgaagaacctgaggtgcaatgccagacgccagataggtatctgccagtgcttccagtgctgctcccagtccacccgatgcagaagcggtcattccgcagagaatattaatagaaagaacttcacttaacagtgcattagaggaaattcccagtgcaaaagcctggataatgccaaaaatagccagggattttgttacagaaccaaagccaacaaccgcacagctgttgatcagcggagccagagactcgtttgctgcttttttcagattgtcttttaatccgtcttttaatttgctaaagttaacagctgcaatgaaaaggatggcaaccagcataccaagaagtacgctccatgtaccactgtttgcagccagtgtactgttaaagctttcttccagataacttccatcaacattgggatataccattttagaaagaaccaggtttactaccagaatgatcaggatgggagcaaatgcaagtccgatacctggaacttctttattatcggatacgatcttatcctgataatttccatatccttcccctgcttttttcgctttgttagtacggtaagacagccatgccatgccaccgccaaacataataacagttgcaatgataccaaggacaggtgctgcccaggagtctgttccaaaataagtcattggaatggtattctgaacctgtgggcttccaggaagtgctgtcatggtaaaggtaaatgcgccaagagcgatagcaccaggaatgagacgcttcggaatatcagctgcgcggaatacagcgattgctacaggaagcataacaaatgctactacgaataaggaaacaccgccgtatgttaaaatagcgcaagtcaatacaacagaaagtacggcacggctttttcctaattttaaagtacagaactgtgcgatagactgtgcgtttcctgaaatatccattaactttgcaaaaactgctccgaacagatagattggaaaatagtttttcgcgtaatttgcgaaaccggacatatatgtaatggtgtaagacgccataaaatgtcccttcagtccataggaaaacagtaccgcgatcagtgcagcaataggcgccgcaatgataacgctgtggcctttaaatgcaagtacaactaaaagtgcgatggcaacaaataatcctatgatcccaatggtagttcccataaataaatccccctttattcatgtgcaagtaaaagtacctcatgtgctacagtttcagaaaatgccttctcattgatgtttgcatctacaatgaccagttttacattatttccgatctttttcttaaatgcgtcaaccatgacctcatctacttctggatcatacattggtccacctggagcggcagcttcacagcagccttttgccggtattaccagtgttaccggactgaccgcctggttcagcctgctgcagacaacatcaacgatcttctctgcctcttctttgtagatcttacagtggcagatactggaattatgatatacctttttcctctggtcaatatcatccggaagcccctctccctgttcattgataaaataatctaccatgtccaaagcaccaggcaccactaccataggtattttgtgctctacagctgtcatcagacgatcatttgcacctacgcaatatccaccaatggtctcacaggtaatctcatgaagggtcatatccagcgccacatcaatacggccttcccgcatcagattttccatacatcttccgccaacgccatttgcgtggaagactacattttcaaacagaccactttcttcgatcatatgaagagcattttctgttcctttagaagttacgcctaattctgtcgctccaaggacttttttgccctcttcgctcgggaaggttttagcgtactcagccagtcccatagctgcgctgcatacgctctggatcacagtcttagtaatactgttcagaccggaaatatcagctactgtatgcataacgaaaatatctttgtctcctacatactgctccatggtcctgcttccacatgccagagaagatgctacgatcttcggcacagcaaaaggcagtgtcttcattgccattgccgccatttttgcgttctgtccgcctccaatagaaatgacaacatcaaattttccttctgcatacaactgcggaagtacaaaggctgcagccttgctcataacatcaatacttgcggcttttcctaatggatcaaaatcttcccactcgatcccgtagcgttttaatatttccaccggtgtgatatctgccccgtctaccagatttttggtactgatatcaatgatataggtggaaaatccctgtttttggatcacagatgctgcatacagggtttcttttttctttgtatccaaagatgcgatcaacgcgattgtttttgccatacccctaccatccttcttccggcttttgccggaatgtactgttattttccaatgatccttccagaattaataagatcgatcatctcaggtgcatgagtaggaaggatgaattcctggctctttgcacgtttctttaattcttcgatgctgtgccattcttcaacgatatttacaaatctggaaggtggtgtaatatcatagaaaatatccgggcatggttttaagttatcatatgtaaagatcagatcgccgcagcagtggaactggccttcttttgtatttacaactacggtctggtgtccaacagagtggcctggtgtaggatatacactaattccgtcaagaacttcacattctccgtctaataaaacaaattctctgccttcccactgtggatggatgccaagatgtggctcttcgtaggacttatagtacagaggaattggatttaatgcaaattcgtattcctttctctgtgcgtataattttgcattcttaaacattggagtatagtaaacatgatcccagtgtaaatgggtgtagataatgtcagtgatctcatcgcagctgatgcccattttctctaactgctcatagatcgcataaccttccggctgaacggaacctggatgatgatatttgttggcgatctcagtactggacattccggtgtcgatcaggatcttcctgtcttcgctctgtactaaaaatacagttacaggaagctgaatatttccttctacatcataatacttatgggtgctgttgtgatacagataatttgccttgttagagtttaccattccagtgttaataggtgtgattgtgtattctttcatatatatttatctccttctttaaattatttcaacatctcaaactttttctgttcccagttgatcatggaagtctcttcgatcaactctgccgtctgtcctgcttttacagctgtcttatccatggttacaatgccatgtccctttaagatcagtgccagcaatcccggatttttatcgatcacttcaaaaacctttggcaattcttcttcggttactgcctgagtagctacgtccacaacaggaatcggatattttaacttcaattctgaatgcatggtcaccaggtcaacctgggagaaattcagtgaatttaaaatagcataagggctgtgggtgtgaacaatgcctccaatctgtggatatcttttatacagatttccatgtaaggtagactctctggtaggcttgcctcccatgactacatttccgtcaaaatctgtgatacataagttatcctctgtacactgcccataggaaaagccacttggctttacgatcatcagattttcccccgggatcctgacacttaagtttccccctgttcctgtctggataccgctttcataagtacgcttggctgcagccaggaaatcattttttgcatttaaaaatgctgtgttcatacctcttctcctttcggtttatttttataccaatttgcgtctctgttttatataccaatatataccacaatcttttcttcttgtcaacaaagtgatatattttttattccatttcggctttttatgcaatttcacctgtttgtttttgtagatttcttataataagttggtttggtatactttggttcaaaccactttcattccaataagcacatgcacaaaaaaagaacagctctgcctttttcagtcaagctgctcttttccatcttctttttctattttatttttctttcttaccactattttatttttctgtcatactatttccgtatcaagtggtgtaccacaccttcggcaccggactttccccttctttttcttctggtactttccttgccagcagttcttctactctgcttaaatgagccatcatagcttctcttgctcctgcttcattgtggatcaggatattttcaaaaatactgcagtgataagtaactacttcatccataggcgtagtcatttttaaactccagtactgatgaagggacataatattaggcattgcttccaggcactgctcaaatacaggattatgggaagcccgcaggatcagacggtgaaacttcgcatctgcctgaaagaaatcattgtcctgaccggttttcagtttccggatctcctggattgtggtgatcaatgccttttccagatcatcgatctcatctttacggatattttttgccgcctgggctgccgcttctgactccagcagttttcttacatgaatggtttcaagaaggatcacatccggctgcataaaggtttctgtctgttctttctctccattctgcatagcgtttgccgtactttttacaaaggttccggctccccgcttgatctctaatattcccatatcagaaagagcttttaacgcttctcttaccggaatgcggcttacattgtagtattctgaaagttcacgttcagaaggcagtttactgccaacgggatattctcctcttaagatcttggccttcatatcatccaggatcattctgtttgcattattatttttcatattttataattttctccagtttgatacctagtattataccagtcagaccaatttcatgcaatcaggaagataccaaaacataccagtcattttctatttcttttagcaaatccagacataaaaagatcccgaaaggatctaatgcccagtaactaagccttatcttctttcgggaaatgttttcgtactatataatatgtaaccatatgggatgctgctgttatgatccaggaaaccggataggacaggtacagcacttccagcgtgcggttgaccgcaaagattgtaaagatccagaatacacggaatgcgcatgctcctgtaagggatacaaacatggggatcacagaatatcccattcctcttaaacttcctaccatacagtccataagaccgcaaaggaaataggtaccgcagatgatccgcagtcttcgcataccaaagcttaaaacttccggatcagaggaatagatacccaacagctgatggccgccaagaactgcgccccatcccagtaccagtccaactacagtaacaactccaagacagatattttttatcttatcaatacggctgaatttttcaccgcccaggttctggctggtaaaactcaaactggtctgatacaccgcattcatggctgtgtatacaaagccttcaatattggaagaagccgtatttcccgccatggcaatggaaccaaaagagttaacagatgactggatcagcacattggatatggaaaagatcgctccctgcatacctgccggaagacctacacgcacaatctgtgtcagctttccggatacaatacgaagttttgtaagatgcagcttcatggctccgttttccttcatcagactgcggataataagacctgctgatacacattcagaaataacagtagcccaggcaacaccgtctactcccattcccagctggatcacaaaaaacagatttaacactacatttactgcaccggccgcaaacagaaagtacagaggccgtctggtatcccccactgcccttaaaagagctgcgccaaagttatagatcataagcaccggcattccaaaaaaatagatccgcagatacagtgccgcctgatccagtacatcatccggtgttcccatgagtgtgagcataggctttgaagcactttctccaagaactaccaggaacagaccgcttaatatagccatcatgatcgctgtgtgtaccgtatcctggatatctttttctttctgtgcgccataatatctggctgctaaaacgttaacacccacagaaagccctacaaacacattgatcatcagattgatcaaagatgccgtagagccaactgctgctaacgctgtacttcccgcaaatcttcctactacaatgatatccgctgcattaaaaagcagctgaaggatacctgaaagcataaggggaattgaaaaaacaaggatcttgcccagaagagggccgttacacatgtctatttcatatgattttttcattctctgtatgctccgctcccatctagcctgcggccatctatggtacagtttgtcatcatcacgccgtctgaagggttcagataatacaaggcacccatagagtcctgccagcctgtcaacatatatccatccatgccaaaaagataccacttatcattgatctttgcccaggatgtaaggtactctccctgatactggtagcgccatccttttacatctttttcccattttcccagatggatattgcggtaagcagccatatctgtttccggagccatggtaaaataatattctttgcgctcatcatccttggaaaattccaccatgtaacagcgttccagggagtcataaacatctcctttttcgctttcacggctgaatgtttccgggcggaccaccggataatgttctccttctttcagaccatatacacggcattccagatttttctctgttccgccgtcataagtaaccaggtaatagcttaaggtcacatcatccaggtttaaggtgtctgaattttttgtaacggtaaatgtatctttttcagatgcccggtttcccattatataggaagtatatccatcataaataggagtctgcctgttattgatatccatatgcagggtaaggggaacttcttttttaaaggcagagccagcctgagaagagaaggcgcttccgacagccagaactgctgccagaagcaatgtcacgcattttttcacttaacatcctcctctcatctgtcctactttaaaataactttcttaaagttcttctttccgcgcttaactacaacgccgtcacctgcaaactggtcttttgcaaatactgccttgatatccttgatctgagttccgtcaacagatacaccgccctgctctacgtttcttcttgcctcagaacgggatgcagccaggccggactttgtaagaacggttaaaatgtcaatattgtcatctgcgaaatcttcttcacttaactcgcaggttggcatattatctgtattagcgccgcctgcaaataaagctcttgcgccttcctgtgcctttgttgcctcttcttcgccgtgtactaacttggtcagctcaaatgcaaggatctcttttgccttatttaactggcttccttcccacttgtccatctcatcgatctgctctaatggcaggaaggtaagcatacgcaggcacttaagaacgtcagcatcaccaacatttctccagtactgatagaagtcaaatggagatgtcttttcaggatccagccatacagcgccggactgggtcttgcccatcttcttgccttcggagtttaataacagggtaatggtcatagcatgagcgtctttgcccagtttacgacggatcagctcggtaccgcctaacatattgctccactggtcatcaccaccaaactgcatgttgcagccgtagcgctggaacagctcatagaagtcgtagctctgcatcagcatgtagttgaactctaagaagcttaaacctttttccattctctgcttgtagcactctgcacggagcatgttatttacagagaaatgaggtcctacttctcttaagaattcgatgtagtttaagttcatcagccactcagcattgtttaccatcagggcttttccatcggagaagtcgataaaacggctcatctgcttcttgaagcagtcacagttgtgctggatgatctcaggagtcatcatcttacgcatatctgtacgtccggatgggtcacctaccataccggttccgccgccgatcagggcgatcggcttatttcctgccatctggagacgtttcatcaggcacagtgccatgaaatgtcctacatgaaggctgtcagcggttgggtcaaaaccgatgtagaaaactgcctttccttcgtttaccattttacggatttcttcttcatttgttacctgggcgatcaggcctctggcaactaactcttcgtagatctgcatttttttctttcctttcgtcgcattatatcttaattctaagtatagcaattttttctttcatgtacaaggaacagggaataaaaaaagcttcgtccccgctaaaggacgaagctgtaagcccgtgttaccaccttaattcacagacagctcacactgcctgccttaaaaggtacactctttcgaggatacccgggtactataacgtgtaccatctccgttgcagcctactaaacttttatgttattcggtgcaaagctcagggatgtattcatgttctgctttccatgcgcctctcatctgccgactgctttctgtatgcttttgcagaaaattacttgttcccatcattgccaagtcatgaaattaaggctattataggcagttatatcatttttgtcaatgggatttttttgcgttgcaacttccacaaagttatactataatgagtcctaaagaaaaagaagtgactgcaccggcagacatttgttttcataagttgttacatcgggaggataaagaagacatgagtttcaaacttgtaaatgaacttccaagcccggcagagatcttagaacagttccctctgcctgagaagctggcagttttaaaagctgaaagagatgaagagatcaaaaaagtaattaccggagaaagcaacaaattccttgttatcatcggaccttgttccgcagataatgaagatgctgtctgcgactatgcaaaccgtcttgcaaaggttcaggaaaagacaaaagacagacttctcattgtaccaagagtttataccaataagccaagaaccacaggcgaaggctatatgggtatgctccatcagccggacccggaaaaaaagcctgatatgcttcagggaattttagcgatccgtcatatgcacatgaaggtattccgtgaaaccggaatgtctactgctgacgaaatgctgtatccggataaccttcagtatctgtctgatatcatgtcttatattgcagttggcgcgcgttctgtagagaaccagtaccaccgtctggtagccagcggctgtgatgtaccggttggtatgaaaaaccctaccagcggcgatctcagcgttatgttaaactctgttgtagcagcccagctgccacatgactttatcttccgcggtgatgaagtttcctgccctggaaatccattagcccataccatcctgcgcggtgctgtcaataaacatggacagtgcatcccgaactaccattatgaggacctgcacctgctctttgagctttactccaagagaaacttaaagaacccggcctgcatcgtagataccaaccactccaactccaacaagaagtatgcagaacaggttcgtatcgcaaaagaagtgcttcacagccgccgccattctgatgacatccgtcatctggtaaaaggcctgatgatcgaaagctacatcgagccaggaaaccacaagatcggcgaacactgctacggacagtccattactgacccatgtcttggatgggatgagtctgagaagctgctgtatgatattgctgagatggctgattaaaaattaagatcggtattaaaaaactccgttcctgatatgataacaggacggagttttttgtttgcgatcttttatctgcctgccatgtaggcatttggggatttatatttttcaggcagccagtgctgtaattccaaaatacgcaagcactacaacgcctaagataatacgatagtatccaaagaacttaaagtcgtgtctgcgcacatatcccattaagaactggatggaatatacagatacgccaaaagcaatagccattcccagaatggtgtaaaagatctgaggaccagttaatacatttccttttacaaaaaacttcactaattttaaaaaacttgctccaaacatgaccggaatacctaagaagaaggaaaattctgctgccacgcctctggaacagccaagtaccattgctcctaaaatggtagaaccggaacgggaagttcccggaaccagggaaagaagctggaacagaccaataaaaagagctgttttagtggaaacatgaccaactttggtaatggatgggttagctgtaatagagctgttttccagagcaatgaacagcacaccataaatgatcagtgtagctgctactacatatgcgttatacagatgagcttccatccagtcatcaaataaaaggcccaatacagctgccgggatacatgcgatcacaatcttgatccacaatgcccaggttgcctgcttctgtctggctgatttagatgggctgaatgggtttaatttctggaaatacatgaccgcaactgcaaggatggcacctaactggatcactaccagaaacatgtctttaaatgcgtccggctggtttaaatggatgatctcgtctaccaggatcatatgacctgtgctgctgataggcagccattcggtgaaaccttccacaattcccagaacgatcacctttaaaatttctactatactcattattactccttatatttttatctttatttttatatttatttttctatgttttcaatctgccagtcaatcggctccaaaccatgttccctgagaaaatcattggtcttgctgaaaggacggctaccgaaaaatcctctataagcagataacgggcttggatgaggcgcctctaagatcatatgctttggattgtttaacatagcctttttcgcctgggccggtctgccccacaggataaataccatcggacggtcctgttcatttaagacccggatggcagcgtctgtaaactgctcccagccaatatcatgatgggaattggcctgatgggcacgtactgtaagaacagtgttcaaaagcataacgccctggtccgcccattttttcagatagccgttatttggtatgtaacagccaagatcatcttgaagttcctgataaatattcaccagggacggagggatatctatatccggctttacggaaaaactcagtccatgtgcctggccgtcgttgtggtatggatcctggccaaggatcacgacttttacatttgccaatggtgtaaaagaaaatgcattgaaaatatcatccggcgcaggaaatatcttgcgggtctgatattcgtgaagtacggtatcatataattttttataatatggctttttaaattcaccctgcaatggttcaagccagtcattggatattgcagccatttttgctccttttcttctgtgatgttgtatttttcacagtcttttatctgttaatgccaatatttttatctacacaacagataatcttatctgcgcacagaaatacctctgccagccagataatccttcagatcacagatctccagttctttatagtggaataatgacgctgccagcactgcatctgcctttcccttagtcagtgcatcataaaaatgctcttttgttccagctccgccggaagcgatcacaggaatactgaccagatctgctacagctgcagttagttcattgtcataaccggcttttgtgccatcacagtccatactggtaagaagaatctctcctgctcctaaagagtctgctttttttacccactccagcacatccagacctgtatctaagcgtccaccgtgtttgtatacattccaaccggaaccgtctgccctgcgctttgcgtcaacagcaaccacgacgcactgtctgccgaatttctgggctgcatcatggatcagctgtggattgtcaatagcagatgaattaatggatatcttatctgcgccttcacgaagaagcagtctgaaatcttctactgtacggataccgccgcctactgtaaaagggataaataccttttctgctacctgacgcaccatatccactactgtttttctatggtcagaagacgctgtaatatccagaaatacaagttcatctgcaccggctctgtcataagcagctgcaatctctaccggatcaccggcatctttcagatttacaaaattaaccccttttaccacccggccattattcacatccaggcagggaatgatcctttttgtaaacatattttctcttcctttctctgcgtacttttaaaatctttatggcaggctgataaaattctcaaggatcttaagtcctgtctgactgctcttttccggatggaactggcaggcataaagattacctttttccaccgctgcatggatatgggttccatactctgttgttgctgccactatatcttcagatcctgctttcagataataggaatggacaaaatatacatagcttccatctggaattcccttaaacagtctggagttgggatcgatctttaaagaattccatcccatatgaggaactttcattcccggcgtctccggtatcttaaggatctttcccgggagaagtccaagaccttctactcccggactttcttcactgctttcaaacatcagctgcagtcccaggcagatgccaagaaaaggagtccctttttttacaacctcttttatcacatccaccagtccatactgatgcagacggtccatggcatccccaaaggcacctacgcctggaaggatcactttgtcagcagctaaaagttcttctctgtctctggtgatgactggtgtttctccaagaaagatcagcgctttttctacgctttttaaatttcctgcgtcatagtctattacagcgatcatagtcgttcctctctttcgtcttttgtctgtatatgcagtttatctgcaattttccgttttttatttttcaagcatccagcgaactgaattttcatggacagaaacgcctctttcctctgcctcttttggaagctggtaaaagttttcattgatacggtataattttgatttctgattaaaataaatgatcttctcaaaaggccagcgcattaccgtaggcgtagaaaatccctctcccagttccaggattaccagagaacggttaatggtaccggtctgccatttcatataatctttccatcttggaagatagccttcttcaatatatgtttctgcctttaaagtatttccggtaagaggcgccttgcagtgtggacagatatcatccggtacttctccttcttcccagatatcctttgtgcaggctttggagcactgtctccagtggatatttccacagggagctacgatcctgtttttatcaaaaggcatttcgtaaatggctccatctgttaaagtagtaacaatataataatctttatcctggatcagctgataaagttcctcataagctgccttcagatcagactgggccggatcgcttaaatgacggaaacggatatctttttcatcatcccgcagcgcccattctttcccgatcccgatcaggactttctgagcctcttttatcttttctctgacctctgcttttgtattttccatggatttttctgccttcctgcaaattatgtcaatcaacataataccacagacagcctttcatttcaattaaactgtttataaacaccggcaaacgcccgcataaaaaagataacttcaaaaaagcaggcagaattcccctctgcctgcttcaaaacatttataatctttatttaaactgctctaaaatagaagtaccgatggttccttccggcattttcacttcaaagttatctgcaactgtagcgccgatcacaccgaaggtatctgtttccggcaattttccgccttcttttaaagacggggaataaaccagaagcggtacctgctctcttgtatggtctgtaccggtccaggtcgggtcatttccatgatctgcagtgatcattaacaggtcattttctttcagatcctgtaacagttcacccagcttcacatcaaagttttccacttcttttgcataaccttccggatttcttctgtggccccacagcgcgtcaaagtcaaccaggttgataaagcataaacctgtaaagtcttcattttttgcaatatcaatggtctgctccataccatgaaccgagctctttgacttatacgcctctgtaatgccttcgccgtcaaagatatcacggatctttcctacagagatcacatcatatcccttttcttttaatgcatctaaggcagtctttcctgttggctttaaagcatagtcatgacggttgctggtacgcttaaactcaccctttttctttcctacataaggtcttgcaataacgcggcctactctccactcatcttttaaggtcagttcccttgcaatctcacagcagcggtaaagttcatccagtccaaaagtctcttcatttccgcagatctgaagtacggagtcagcggatgtatacacgatcatgtgaccggttgcaatctcttcctctgccagctcatccaggatctctgtaccgctggcgctcttatttccaatgatcttatgtccggtgcgctcttccagctcatggatcagttccggcggaaaaccatgatccgtaaaggtaacaaatggctttgtggtataaattcccatcatttcccagtgtcctgtcatggtatctttaccacagcttttttcgtttaataccagctgatagcccagaggatgttctgccggtgttactccctttaaaggatggagatttgcaagtcccagtctggtcagatttgggatcttccagttatcatgtttttctgcaatatggcccatggtatctgccccgtcatccccataggcagcaccgtcttttgcatggcctgcgccaaaagaatccattacgatcacaaaaatacgtttgaacttcttcatcgtttatacttcctcccattgatttcccatgttttatacattttctgctttatttctgtctctaacatcagtatacacaaaaaggaaaaataaaaaatgccatatggcactttttacaggaacaaattttcataaaacctttgccattattatcaaatttcacttgaagcttctttgtaataatgttaccatgtacgtattgtatgtttctcccattttccgggagtacataacatttctcaggaggaaaataccaatggaactgattataccggaacactatgatccccgtctggatatacgtgagacccaggatgccattaaatatatccgcgatacctttcagaaagaaatgggacgcgaaatgcatctggagcgtatttccgcacctctgttcgtagaaaagagcagcggtttaaacgacaacttaaacggcgtagaacgccctgtgtcttttgatatggctgctatccccggtgagactatggaagtagtacactcccttgcaaagtggaaacgtatggcattaaaagaatatggtttccagccaggtgaaggtctttacaccaacatgaacgcgatccgcagagatgaggaactggacaatctccactcctgctacgtagaccagtgggactgggagaaagtcatcaacaaagaagaccgcaatgaaaagaccttaaaggatactgtacgcctgatctttaagatcattaagcacatgcagcatgaagtatggtacaaatatccacaggctgtaaaccagcttccagatgatattttctttatcaccaccagcgaactggaagcaatgtatccggacaaaacaccaaaggaacgtgaaaacctgatcaccaaagaacacggctgcgtattcttaatgcagatcggtgacaaactggcaagcggaaagccgcatgacggccgcgcaccggactatgatgactggaaattaaacggtgatattcttttctggtatccaaccttaaactgcgctcttgagatctccagtatgggtatccgtgttgatgaagtttccttaagagaacagcttgaaaaatccggctgcatggaccgtatggaacttccataccacaaaatgcttttaaacggcgagcttccatataccatcggcggcggtatcggacagtcccgtctgtgcatgcttttacttgacagagcccacatcggagaagtacaggcaagtatctggcctaaagaaatgcgtgacacctgcaagaagcacaaaatttacttactgtaatcacaggagagccgatcatttatggggaattctatttcgatcttctttctcatcgaggctgtaggtaccattgcctttgcgtcctccggcgcaatggtggcgatccggcagaaccttgatcttttggggatcattgtattaggtgttacaacggcagttggaggcggtatgatgagggacatccttttagggatcgttcctcccagcctctttacaaacccgatctacacgatcatggcatttattactgtcatggtcctttttatcgtcatccgtatgaaccagcatttcctggaaggtgactgtatcgtcacctatgaaaagctgatgaatatcttcgatgccattggactggctgcttttacagtaaccgggattgatacggctgtaatggcaggatacggggattatcattttctctccgttttcttaggtgtgcttaccggtgtaggcggcggacttttaagggatattatggcaaggcagaccccttatatcctgaaaaaacatgtttatgcatgtgcttccattgcaggtgggatctgttattccttcctgctttccagccctgtgaataatgatattgccatgatcacaagcgctgctttggtcattgccatccggcttttggctactcattattgctggaacctgccaagagcgctaaagcagtcctgatctcattttccacaaaaatatgaaattccagctccaaacttaaatagggcttctgtggaacacacatatcacaaaggattagaaaagcaaggacgcatctttccgcccttgctctattttatcaatatttttataatcttgccaacaattcgcccggtgtaaatgcaacaaccttgcttttcacaaaatcttttatatttcgcgttactatatagtcagcatgaatcgcttccgcagttgcactttgtaccgcatcttcaaagtctggccatttcatattcacggatttttccaaaatcatcggactaaaatctgtaaactcaaaaatcaaattcagattatgaaattcatgttttggcaatggtgtttcgtgaaaaaatatgggtgtgtccttcgtatcaattctgctgattcgttcttttacaagcatttcctctcctctgtttcctgctttttactttaatacttactcctgttttccttgccataaggctacgccttgcaatgcttacaacatgatcgctttcataatttcctgaacagtattgcaggtatcttcaaaggaaatatcctttgcgtagtcatattcgcgtctgtatttttcccacagctttcgaagggtatcgctttcccggataagagaacctccatataacgcagaaccttcggcttcacgcgaagctgatctgcgtacttcatcagtttgtgaatatttttgtctttggagtccgcatagcgtttcatagcctcactgacgatctggatatcgctgccgctgccgcgcaggatatcgcacaacgtccgctccaaatcataaacgcggattggattgccggacggagatttaatttggatttgcccaaactcataattttcaggcacaacgcgtttgatgatcaagttttcttgcttcagagacggcgcattgtagcctttcggaaaggtcatcgtatatttcgccggggtacggtccgaataacccagcaggtacagtgcggtatcgtgggaatagattccacgtccgtacttacgctgcaaaaggtaaaaatcgtcctcccacacattaaattacaacaaaataatgtgcgttcgtcaaaaaagttgtttaatgcttcattaaaatattacaggaatatattactataagtcgcgccctatatgatatcaacatctggtcatcacattccagtaaatgtcacaatgccgaaaaacagacagatcgcagcaccgtagaaatataagaatccaccaaacactggctttcttgggcggttttccgtgatgagatccggccggtctggcttataatatccaaccacctgctttcccacatctcgtttactggaaaccgactgaaaactgaggtaccggtatgtttttccattcaccgaatattcgtaagttggaagatatgccttttcgcggcgcagctttgaacttccatccggctgatcctcccacctgtcatattcagactcttccacatgcaccactttcatcatggtactggctgaatataaccgcacatcacgtttgtaaccattttttgctcctctcctttccagaataccaagccaggcaaaaagcactgcagcaatgctgaagccgaggcccgatgtgatatcgtctatatacgggaacggcaacgctaccagtgcaatcgcaaggctaaacccacacaccaggattttaactcttttcatacacacctccgaccatttatattccggctgatttatttttcttttccatcccatgcaaattcgcatggtgttcccctggtagcgggggaatagccacattcatcatcatgtttatggacgcacttgagcacttccgtatagcaatcgtctgtgttctcgtgactgcaggctgttcctgttgttccttcagagcagccgcactcatcgtcatgctccggctgatgttcacacaaattacttgtgcttacgattatgctgcttcctgtttgtgtgccggctgcggcagctaccgattgagagcagagcgaaaacagcatggttccgcaaagcagcgaaagaagcgttccaccagccctgccgccattgcgcttatgcggttcctgtgataactgctcatctgtcattttctgttctgccatattcttccctttccaccacgtcggttaaagcgggaccctcgatcaggcggtccagcacgctgcccagttcctttaaagatcggatgtagcttcgacgcgccgcatccaggtcactcaggtctacgctgctcgctatagttgcaataccgaaatccgtttccaataccagggaaaagatctttccctcccagcaaaaactcaagatctgcccttccacatcccgatcaaacttcgtcaaaaaatcgatgaaccgcggggtaagacgacacgcggcatcctgcttgctgtttgccgtgacgcagaagctgcagtcaaagatattattgcctgtcaatacaccgcatggactatcctccgtccgcacattagcaagaacgggcgagggaaccggaacccatgtcctgcagcgaaggacgatgcccttaaagaccattttcctgcaggtttcatagccatcgtgcgaacatcctctctggtacacatgatccagctgtacattagcggcagaaaaatgtatgccgccatgatcgccctcgtggaagttctccacggtgcactcctcccatttaccgtccagcagatgatgcgccctcatgaacggttcatcaatgcacatttcctgggtgtggatatccggcccgaaagccttttcccactctgcgcggaaaaagtctcccatctgctcctgcatcaggactttcagttttttctgtgccccaccgctgaaaaaggacgcgcagaaaatgccgccaaaaaacagcactgccacaaggagcgatttgagtgccttattctgcaacacaaaatagaaaatggcaccgctcactgcgccaaccactcccacccagaaccagatgacggacattgcctgataatgtcccagcttttttgacagctctgcatctgtcatctttatcggtttggaggaaacggaagctctattttttttcttcataaaactccccccttaatcacaaaggctgaaatacagactgcagtacggttctaaggtatcaagatccagaacacaggcttccggagaaatgctgtccagctgcatctttctggcactttcctggtaagtatccggttccgcctgagccgcgaacacaaggccatcgtagtcggccggcatatagacggaataactcttagtcaggaccgcaccccagtcacccacctggaaattccagtctgtggaataggtgaattcgatcagatagctgtttcctctccagctgacggtgtgaagataatagttgtcgccgcgactgctgttgttaaacgtcgatcccgctgtcagccacatgcctgtataggcatcgtacagttcgctggacacaacgaccgtcccattcgcagcagttgaaattgcactttccggaatatagcagatcgcgtcaaaatgcagatcacggatgccgtcatggatatcatccgcctttttcgtaacttcccaatagcagtcactccggcggtagccattgccttccccggaatagctgcttgcgccatttgctaacaggaatgtaccaagttccacttcggcattcatttccaggccatttctggtaaaataaggcacgctggactggatcgcttctaccggaaacagacttccgccattggtaagatccatcagatcgccactgatcgtaagatcaagctgtaaggtgtcaccgcttccatcaaagtgaagcgtaattccgttttcttccacccaaagcgtacccgattcaatcacatcatcctggtcatttacaaattcccaggtggaatcatcgtggatgcgcagccagcggttctccccctgatattcccagagccccacatagtcttccaggttcatagccggatccgtttcctcagcagtatcctggtcttcctccccgatcgtaatggtggaaagattatctccatattcatcaatgaagctgaccagaacatcactttccccatcgtgggtaatcgttccgctgccggccaccacaccgctggtccgccagtcatcacccgccacgtcgccggaagcaccgcaggccactaggctaagaccaagcactacaggcacaggagcaaggccggaacaggaagcaaatatattttcttttttaaggccatctctttctgctggtcattcacttctttcatagtattcatttgtatatccccagtacatagctcccggttccgctaaggtgatcggataaaacacatcgtcaaactgctcagaaacggcaaagtactgatcatcgccccgctcatttacctggagtattcctgaatccacttcagccggatccccgtcaccatccgggcgctctgaaaggctccaactgccatccttttcgatctcgatcacactggccgcatctgcctctccatctaaaaaccagaccccggccaattcctcacagtcactttcacttacatctctccccagaggtttcttggtaaacacaccgaaggagtcgatatgaagtgccccatcctcatcccgccagacatgatgagcccaaccatcatgttcattgtagaaatagtctgcttcatactccggcacaagctggatataaccgctggccatcaggttgtcatcctcgtcgtaccattcaaagcggtcttccccactgccgtttaaacccacgatcagttcgctgtcatcttcgccgatccaggtaccccagtacatgtcataaactgccgtgatatccgtatccttcaccattccttcaaaagactccggagcactgttttcagtctcttcgtagtcttcctggtcatcgctgctgccttcgctttcagcccctccaccgcaggcagcaaggcccagacacactgccagtgtgattacgggaaataacttacttttccattttttcatcctgcattcctcccttttcgcaaagctgcgttagtgttcctgttctgccatggacaatatttcatcgtggctcagctccacatctccgaagcggacaaagataccgttggtcacagcactactccacacgttcttatccgcaagcgaaagaaaacggatcttatccagataaggcttcatgtccagcaaaagccggcttcccgatacaaaatcgacctgcaaaatataatcgggcagcgttgtaacagcctttagatatctccgtttcaagagtatcctcctttctgccgtgtcataaagatattaaaaaatccaccgtactgatattgtacggtggatcctatgggataaccattaactaaaggttagggatttggtaagaacagctctacaagctgactcctttttgttctggtatcgccctcaatatgaagtttggaataaatctgatttatgtactgctgctgatggcaggacggctcatctggctgctggcgctgcgggagatgggccgcaggtctcctgcagtctttccgatatgtatatggtattcagattccattttgtttttggcatatgcacaccccatttttatttcatcgtcttatttattcttttttactgtgtccaaaaacaactggtggatacggtcatcttcatccagttccggatgaaaggacattccaatctgatttttatactgtacagctacaatatttccatctgcttttgcaagcacttttacgccttcctctgctttttccacaaaaggcgcccggataaaggtcataggcacttttccaatgccttcaaattcttctgttgtgtgaaagctgccaagctgtcttccataagcatttcttcttacggaaacaggaagtgtagcaaaataacggtggtcatcattggtaaggtcttttgccagaaggatcagtcctgcacaggtggcaagtaccgacatccccgcttctattttttcttttaaagcatcaaacatgccaagttcttttaacagctttccctgaaccgtactctcaccgccgggaagtaccagaccgtcaaaatcctcttccaggttttctttttttcgcagttcgatacactgggctcccagcttttcaagctttttctcatgctcaatgaaagcgccctgaactgctaaaacggctatcttcatcttattttcctctttctgccattaaaagcttgatctcctgctcattgatgcctaccatggcttctcctaagtcctcagaaagctctgctaacatcttctggtctgtataattggtaactgcctttacaatggctgctgcacgcttctttggatctcctgatttaaagataccggaacctacgaatacgccttctgctcctaactgcatcataagagctgcgtctgcaggtgttgcaacaccgcctgctgcaaagtttacaactggaagacggccgtttttatgtacatattctaccaggtcataaggcactcttaatacttttgcctcttcaaacagttcatcttctctcatggatacgatctttgcgatctcctggttcatcatgcgcatatgacgtactgcctggacaacatcaccggttccaggttcgccttttgtacggatcatggaagcgccttcgttaatccttcttaatgcttctcctaagtcctttgcgccgcatacaaacggaactttgaattttctcttatcaatatggaatacatcatctgcaggggataatacttcactttcatcaatatagtcgatctcaatggcttctaaaatctgtgcctctacaaaatgtccgatgcggcattttgccataacaggaatagaaactgcctcctggatgcccttgatcatcttcgggtcactcatacgggatacgccgcctgctgcgcggatatctgcaggaatacgctctaaagccataaccgcacatgcgcctgcttcttctgcgatctttgcctgctccggtgtggtaacgtccatgatcacgccgccctttaacatctgtgccagctgcttatttaattcgtatctctctgtatttgtattcatctttcaaacctcctggtcttatctgatatatttttgaaatattttattgattggcccgaaacattttggattgactagagtataacgtatatgtggactttttataatagccaattatcatatttttaaccagtccagtttgcatataaattaagctgcatctaccggttgttcagtaaatacagcttgggatatttgttattatttttctttattggatacgtttattcttctgcaagagcagccgctttatcactgttccactggatcgcatcatatgcttcaccaatgtttaacatatggtcaccaatacgctcataatctgtaagcatttcagaatacaggatagaggactctacattacagtggccttcgcgcatacggtcgatctggttctgacggaagttgtcggtgatatcatcgatcttctgctcgatcgcctggatcttctccagggtaaagtcactgtctccggctgctgcctttctcagaagctccatacctaatgcacagctttcgtccatgactttaaattcattttttgcataatcagagaagttcaggttcttttcctgaatggtctgggcatattctgccaggttcattgcatgatcgccaattcgctcgatatttcctaaaatactgtacatcttatttaatgcttcaatatcctgaggtgtctggtctaaaacaagaaccttggaaatcttctttgacagacgtacattggaaagatcgatctcctcttctctgtctgcgatctcctggataccattttcacccggtccctgttccatggccttaaagctgtcagaaacattggaagcagctatagccagcatatcccggatctcttcatggatctggctgatggcaatggtagaaacacccagatgatgcttggaagccatcaggccttcaaaccactggtctgcatccatcacatgctttacctgggtatccggaaggatctgctttgcaatatttactaacatcggcccaaatgggaataatattacagttgtggcaatattaaagatggtatgcacatttgcgatctgtgcagcaggatttgccgggttagtggtaatcatccagtctacgaatggtgttaccatacacagtaccacaaagataactgtaccgactacgttgaacatcagatggatggctgtagtacgttttgcatttctgttggttcccacagaagccagaacagcagtgatacaagtaccgatattctgaccgaacagtacgaacacagcgctgtgaaggcctatcacgccgcttacagccagtgcctgtaagatgccgatagaagctgcggaagactggatcactgcagtaaacagcgcacctgccataacacctaacagcgggtttttaaagctggtcatcagctggataaattccggttcatcacgaagaggaagcattgcatcgctcatcattcccataccgatgaagataacgcctactccggcaacaatgccgccaacatgctgcagctttttattctttacaaaaaccaccagtacaacaccgataaatgcaatcagcggtgctaaagcgcctacgtccaaagcgatcagctgtccggtaatggtggtaccgatattagcacccataatgatccacacagcctggttaagtgacataagacctgagtttacaaagcctacggtcataaccgttgtagctgaagatgactggatcagtgctgtgatgcctgcgcctaccaggattcccataaagcggttggtggtcagcttttccaggatctgcttcatcttgtttccggcagctgcttccagattgttgctcatcatctgcattccatacaggaacagcgccagacctcccagaaggcccaaaagcaattcaactcccattttttactcctttttcctaaggaacagggtgttttaaatattatctatatattgataatatacgtttttcctgttctttacttgatttttactttgagtttacacttgctcattatacgggatattttctcagtcgtcaatacggattgttggacggttatgtaaagttcaggtaaattgtttgtaaaattacgctatattatccatatatcgataatatattttaacagttttgaagcaaaaaaagaccgccccgaacagggcggtggggtgcatatggtccactcacagtcacgcgctgacgcgctccgctgcctgctggcgcaggcgggccattcgttaagggcagaagaaaaacaaatgaccgccccgaaaacgggacggtcgcttgtttttctcttctgcccttacatcagagacagatataagttcttaatatcctcaaaggtcggatcctttggattgcctggacggcacgcatcatccattgcggactgtgcaaggaagtctacatcttctgccttaacgatagcctttaagtcagctgggataccaacatcagcggacagcttcttaactgcatctacagctgccttgcggtattcttcctggctcatgttctctacgccttcaacgcccattgcgatagcgatatctttgtacttggttcctgtgcatggtgcgttgtattccataacagttggaagcaggattgcatttgcaacaccatgaggagtatcataaacagcacctaaagcatgtgccatggaatgaacaattcctaaacctacgttggagaagcccatacctgcgatgtactgtcctaaagccattccttcacggccttcttttgtattctcgcaagcgcctcttaagttcttggagatcagctcgattgcctttaagtggaacatatcggtcatttcccatgcgcccttggtgatgtatccttcgattgcatgtgttaaagcgtccataccggtagatgcggtcagtccctttggcatagaggacatcatatccgggtcaacaactgcgattacagggatatcgtgtgtatctacacaaacgaatttacgtttcttttctacgtcagtgataacgtagttgatagtaacttctgctgcggttcctgctgtagttggaactgcgatgatcgggatagatggcttcttggttggagctacaccttccaggcttcttacatcttcaaattctgggttagcaatgatgatgccgattgcctttgctgtatccatagaagaaccaccgccgatagcgatcagataatcagcaccagatttcttaaatgcagctacaccggtctgtacgttctcgatggttgggtttggtttaatattggagtagatctcataagcaagacctgcattgtccagtacatcagtcactttctttgttacgccaaatttgatcagatctggatctgaacatacgaaagccttcttgaaagctcttgtttttgcttcgttagcgatctcagcgatagcgcctgcgccatgataagaagtttcatttaatacaattctgtttgccatgatacattctccttttttatgaaaatatactctctggatacaaaatccggagcagttttgtgtttcatgttgttttcctttgtttcgttaatattataacaacactttaacaaaaataaaagtgacaaacttacttgtctgtcactttttgagaatattttttgttttatataagttttattataaaaatcacacataaatgatcacgtatacattcttatattatccgtatatcgatattatcgttttgtgttatatataacaaagttttccgtttttacagcagtttcagctcatcaaatacagcagccagtcttggaggcatagcttccaccagcttctttgacattttcgccggtgagtctttcattcctgtaaggacccattttactgtcatatacacagagcccctgcagtacatttccaaaaggaactgcagatcttctcccaagggtctgctggtctttcgtccgatcagatcctgataaaactgtaagatcagttcaaaatcatgttcttttaaggagttgcggtcgtcactgcggaatgcctctgtaaagaacactttttcatcgacgataaattcaaatttctgtgtcaggctttctcctactgtatgtcccatgccgatctgctcaaaggactggagcaccagtttgtcaaaataccagttgatcaggtcatatttatctaaaaaattccggtaaaaggtctgtctggcaacgccgcagccttccacaatattttttacagttatcttatccaccggcatctgcttcatgcattctttcatggatgctgccagtttgtatttcgttttttcctgctttcctgccggttccatgttttcctcccactatacagctatgtgatctgcccacagacagaatttcagcacaaggcccccggcatgccatttcacataccgagggtctgtattttttccaccccttatttctatcataccagaaacatagggctgtgactatctgtttttaaactatctgttcttgaaaatagagatgatggcctgccacatctgtaccagaacattccacattctctttaacgggccttcatttgccttctctgtttctgcatcggtttccttatggttttcatcatccagactgatctcatctgtacgaaggactacctgtaaggtcttaggggccgggttcttatcagaagtaaaggaaaccttatcttctgacggatcaatgaacaggaagcggttatcggtgtcgaatttatccagctgctcatccataacatctttcatggtacggcctgctgttctcacacctgtagtactgtctaagatgctgaggctcttatcaagcagttccatactgcctcttaaactgttctttgctgcctcatccatatcaccgctggttgcctttaatgtgttctgcacaatggtcatagtgctgacacctttgttcatggcatctgtggtgcggtctaccagctcagaaaggtcatctaaggatgcctgcagatccggataatacatatccagggagtcatgaagagctgtcagatcttcgatcatcatgtccatgctgtctgtcagatctgcaccatattctgctgcatctcctacattatccatcagattggatgcaacctgagtaaattcacggctgtccttatcgatctttgttaacatctgataaagagtcacaagatccacactggatgaagctgctaccagaggcacatcatgtttttcaatatgcgcccggctgagtgtctgtgtatcactggtatctgcctctgctgcattttcccctgtatcagaaacattatctgttgcatcagaaacatcttcgctgctcttattttctgttgctgcatctacactgctgccagcttccgtaccggcatcctgatcatccactgtacttcttgtatcattcagagcttcgtcatacagatccagtgcttctgcatcatagtcctgaaggtcttcgatcagtcccggaagcgcctccaaaatagtagtggtctgtacctggaactgggcattgttctggatcagccatgccatatcttctcttacatcatttaactgttcccctaaagactgggaagtggtgctgatattgcgcagacggttatacatcttgcgcagaggttcctgcatatctcccatggtatttacaatatcacccatgctgttatgcacggtctctgccgcatccttagcagtctgcaaatgtgggaccagagtttccagctgctgtgacagcgctgtcagtgactccagagtctgatcatttccggctaaaatactgtctttattggcactccatttctgtcttgcgctttcagcagaagaaacgccggactgtacctggttgatgccgtcacgcatggactccacggatttagccatctgctccagactgtcatataaagcatctcctgcgtctttccatgtatcctttgcttctttcaggtccttaatatggttcaggtcatcaatagtgcccggtgccattgccatgatcacaccggtagtttcaaaactgtctgtaccaatacggacggtataatctccttcttcccccggaagggcggaaaatacagctgctgtggtggatccaaggctctggatctgggcgccatctgcgtctacactgtagcatttagacatatctacaggaactgtcaccattaacatcatgttgttgcggtaatacagattagcattatcattgggcgtagccttcacattgatctcgatcaggccgtttgcacctgccagtttgtcaccatctgttggaacaccgtttaacttataggacacatcaaaatcccatggaagtaccacctgttcattgtccatggtacacttataataaaaacggcccttctgaccttccggcaggttccaggttacacttccatctcctaaaaccggagcatcactggtactcatattttctacattgatgtaatttccataatcagtgatctcaccaaggccatttaaatttaccccttttactacgtttacctttgttgtttttccgtagtaatccaggttcacatacatggtctcatctatatctgcacctgccggtgcgccatatacaggaacgctgcctgctgatgtgcaaagcaatgctgccgttaaaacagaagctgtcactctttttctaaatctcatttccatctacctccgctgtctgactgcctcttcttgccagggctgctgacgcttttttcttaactgccccaattccggattttactaaggctttccgcttttcatgtcttcgttttaaatacttcttaaagcggtccatttcattacttgtgattataccgtcacagaggactagcagtgccggcaaaatagtaagtaccagacacacactaaacagtgcgcctcttccgatcagatgtcccagtccgcctatagccgccgtactggagatcatatatacaatgtaacctgccagtatcaggatagttcccgaagtaaatactgaggaacaggacatggccagtgcctccaccacagcttccttcttcttcatggtctttctgcaggccatatagttattagtaagcaggatcgaatagtctactgtagcccccagctggatactgcttacgataatatagcccatataaaccagcgtctcgccaaccagataaggcaccgccatattgatataaatagctgcctcaatagggatcataacaatgatgggcaccagtacagactggaaactgaacatgactaccacaaatacactgatcagggacagcacattaactcttgcattatccgctgtgatcgtagtcttaatatcttgcgtagaaggagtttcacctgccacataagagtcttccgggtaatatttcttcacaatatcacggatatcattggtatactcaaaagccttgtcactttctgacttggtccttatgtagatcagcatacggcttgtggtatctgtatgcagctggctggtaatggaataagggagaaaatcttccggtacaccttccggcagtgtatttgccatggatgttacgctttttacatattccagatcttcgatctcatcagacattgccttttctgtaatagctgatgtatttggataaatggcaaccagcatattgctgcggccaaatttctcattaatggcctgctcatctgcatagacctgggttccttcgctgacacctactgcactgtttccgaataagaaactgttcattccctgggcagtataagcaaaaggaactaccaggatcatgatcaccagtgcaatattacggatcttgtaaatgcctcttcccattttatggaaatccggcaggaacggacgatgtgccgtcttttcattccatttcgcaaatcggaagatcatggccggcatgaaaagtacaactgttaaaagactgaatacaattccttttgccagtaccagacccatatcaaaaccaatactgaatttcatgaacatcagggctacgaaacctgctatagtagtaaggctgctggcgaaaatagaattaatggccgcatctaccgcatctaccatggcttcttcatcagaaagcccttttttcttctctctggtaaaagcatccagaaggaaaatggaatagtccatggaagttgctaactgcagcaccattgccacattgttggtcaaaaaggacactcttcctatgaaaatgttagtaccacggtttaacaggatggctacacccatgacaagaagaaacaggaatggctcggaccaggcagtagtcgtaatacataagatcgtaaaaatcataataattgctactgttaagatcaactgcatctcacttgccagattttcctgtaaagacttgttctgtactgccattcctgtaaaacagcctttatctcctgcaatggcttttaattcatcaatggctgcggaagtgctttttgctgtatttccttctttaaaggtcacatccattaccgcatatccatctttataataatcttcgatgtcttctttatggataaaatcttcgccagagtaaatattaacagtactgtcacaccacaggatctgatccaccccgtctacatcttccattctgtctttgtattgcttggcttcatacaatgtcacatcttttagcatgatacgggctgttcctggatagccaaactcatcttccatcttatttaaaccgatacctgactgcgcggtatccggaagatattccgtcagatcgtaattaacttccacaaatagcatggcaactgcacagaatatgcaggctgcaataaaaactgatacgatccagttctgtttttcaataataaaccgggccagcttaatggacggcttttcaccggaagctttttcctttttcccacgcttctttaagggtcctaacttgaatttcttttccatgatcctaactcctccctcacatagatatgtgttatttaacgcataaaaagaaccataaaccagtggtgtccgttcttttcctcatgggccatacccatatatcgataatattgtaatgtgtattttctgtctgactttgatgtatatttacgtcccgttacattcattatcttgtcatatgcctcatccgtatcctcgcagtcccgcacatatacctccaggcaggaagcatttttgcggtaaggaatggatgccagtgtgtcttctatggttccttctcctgtgacccgtccgtctgcataccctttttccatagctgcctccagacggctttgtgcaattttatttaacttcatatccataataaagcctgcgtaccggtcataactggtgtggttgtcgccgtcatattcccgttctctgtctggatatgcgtcaaaatactgttctttcttttcatcccccagctcactgaaaagttcctgtgttatatcatcatagcagcctgcattataagcacctccgcctgtattttccagccacttcgctgttttcaaagctcctgaatcttcaaattcatatactgcattatctaaaaccagctgtccttcgttcatgcctccatcttcgtggaagtaataccattcatctcccaccttttcccatccggtggccatggtcccgtcttccttcatatagtaaaagcggtcgccggtatagagccagccaatgtatgccgtaccatctttttttttccagtaccagttcccgtcaagatttacccaactgccatttggctctgctgcatatactgcatttgccggtcccgctgccagaaaagcggccatcataattatagaaataggatataacctgcttctgcctttcatcctctcatctcctgctgtctttaaaacctctgttttccattattgaactctatatttgttaattgacatttgttcatttattaactataatggattatactaactaatggtgaaaacaacaatgattaattttaattcttttgtttattaatcgacaacattgtagtatatgttcataaacaaaatattaaaatactgtaaacaaatccgagagaacatcacatacaaaaagggggaatttcttatcatgagtacagaagcagtagatcgacgggtacggcgtaccagaaagcagctgcgggaatgtcttgttactttattaaaacagaaaaaagtgcaggatattactgtccgtgagctgaccgaactggccgatctgaacagaggaactttttatcttcattataaagatgtatttgatcttctggaaaaaacagaaagcgagcttttagacgattttaatcaactggtcatgaaacatgatgcagaagatctgaagaagcatccttacggtatttttgtagaaatttacacactggcctatgacaatgcagacctggtagaaatattattaggtgaaaacggtgatttaaactttctgaaccgcttaaaacagctgattcgtgataaatgtcttcacgactggatggaagtattccgcgccggaaatccagctatttttgatgcctacttctctttcatcgtatccggctgtgtaggactggtgcagtactggttaaagacaggcatgaaagagacaccgcagcaactggcacgactgaccgagcaggtgatccgtaaaggcatcggtgtgctggatacagatccttttgcggatatagaaaatgtacgttcctgatccagtctatattattatcaatatattgataatatacgattgcttatattttgttgtatactgatgatattctgagagtatattacaccaaatgaggagaaaacagatgaactacgacgatttattcagagaaactgcctgtgtacgtataaaaaaaggaaccggacgcacattaaaggccggcggcgcctggatctatgacaatgagatcgacactatttccggtgattttgaaaatggcgacctggtcactgtggaagattttgacggctatcctttgggacatggctttatcaatacaagctccaagctgaccgtacgcatgttatcccgcaaaaaagatactgtggtcaatgaagatttcatcgaacagagagtccgcactgcctgggaatacagaaaagctactactgatatctccagctgccgcgtgatcttcggcgaagcagattttctgcctggtattgtcatcgataaatttgaagatgttttagtagtagagtccctggcactgggcattgaccgcttaaagccggtgatcttagataaattaaagaaagtcctggcagaagacggtattttaatccgtggcatttatgagcgaagcgatgcaaaagtccgccttcaggaaggtatggagcgctttaaaggctttattggagaaccattcgataccaaggtagaaatctgtgaaaacggcgttcactacattgtagacgtagaagacggccagaagaccggatttttcctggatcagaaatacaaccgtcttgcagtacagaacctgtgccgtaatctgaaacctgcaaaggtattagactgcttcacccataccggctctttcgctttaaatgctggtattgcaggctctgaaaaagtccttggcgtagacgcttcccagctggcagtagaccaggcaacagaaaatgcccgcttaaatggcttggaggatcacgtcactttccagtgtgccgatgtatttgacctgcttccaaaattagagcaggaaggtgaaaagtttgatgtagtcatccttgacccgccagctttcaccaaatccagaaactccattaaaaacgcagtaaaaggctaccgtgagatcaaccttcgtggcatgaaattagtaaaagacggcggctaccttgccacctgctcctgctcccacttcatggatccggagctgtttaccaagaccatccgtgaagcagcttccaatgtccacaagagactgcgccaggtagaataccgcacccaggcagccgatcatcccatcctttgggcggcagatgagtcctattatttaaaatttattatcttccaggttgtggatgaaaaataacatccgctccagaacagatttaccaacatccagccaatgccggtagctacggctactgcatttaactggaactgacttacaaatatccatgacaggatcacccgcagagtaatgtgtcccacagctcctataaaggggatatttactctgccgatcccgtcaaaatagcctgcaaatgtgtttcctgtaaagcagaacacatagaataccgcaacgatctttaaatatcctgtggctgccagaaaggcaccatctgttttattcccgatcataaatcccatggtagcccttattccaccgggacacccattagccaaagaaaaatccgttcccatggaagcctttgctgtagagtcctacatccagacttatccgggacaggacgtggataatgcccgcattttctcccgctgccacattactcctaacacccagttttccactatggacattaatgcaacctattctatggtagaagcagggcttggcattggcatcaacaatcaggtcaacagttctctctggcaggaccgggtcgtgcatcttcccttaaaaccggcccagaccatgaatattgggctggcctatggaaagaatatttccccggcttcggaaggcttccttcactttatagaagataagctgccggaataaacattcctgcagcaaccggccatttttacccccatattgcaaaaaaactcatttccaagtacactaagtaacaggggaacacaaaacaaatatgtcatcataaataaaaaactggagggattacaacatgatcattgataatgtaaaagtttatacacccgatcagaaatttgtagagggcggtctggtactggatcaggaccggatcgaagctgtctacaccaatgaaaccaaaccggatctttcgggaaaagaggttctcgatggagaaggcgcctatgccattccaggactgatcgacctgcattttcacggatgcaagggggatgatttctgtgacaattccatggaagctattgaacggatcgcagaatatgaagcttctgtgggagtaactgctattgcacctgctaccatgacacttccggtagaggaactggtagatgttttaaaaactgccgcacagtacaaacgtgaaaaacatgactataaaaaggcagacctggtaggcatcaacatggaaggcccctttatcagccctgtaaaaaaaggcgcacaggatgaccggaatatccttccctgtgatattgcactttgcgaacgcttcttagaagcttctgaagatctggtaaaatttgtgggcattgcaccggaagaaagcgaaaactcactggaatttatccgccatatgaaagagaaagtagatatctcactggctcataccaacgccgattacgatacagccatggctgcatttagcgcaggggcaaaccacgctgtccacttatacaacggtatgccggaaatcctgcaccgtgctcccggcgttgtaggtgctgtatttgacagcaaacatgtaatgactgagatcatctgtgatggcatccatatccacccggcttctgtacgcgctaccttccagatgatgggcgctgaccgcatgatcctgatcagtgacagtatgagagctaccggtatgccggacggccagtataccttaggcggtctggatgtaaaagtagtaggaaaactggcaactttagtttctgacggagctattgccggttctgccaccaatctggctgattgtatgcgtaccgttgttcagaaaatggacctgccattagaaacagccgttgcctgcgctaccatcaatccagccagaagcttaaagatcgataaagactacggctcccttgaaaagggtaaaaaagccaatgtagtacttcttggaaaagatcttgaattaaaatgtgtgatcaaagacggaaagaggatctgaaaaaatgacaaccataagacctatgcagcctgctgacaaggaggctgttcttgcaatgatggaagttttctacgcttccccggctgttttaagcaacggctccgctgctattttttccagtgattttgaagcctgcataaacgataatccttatctggaaggctatatgtttgaggaaaatggccagatccagggatatgccatggctgcaaaaagcttttccacagaattcggccgtccctgtatctgggtggaagacctttatatcaaagaggattttcgtggaaccggcattggaagcttatttttggaatttattgaaaaaaagtatcctgaagccgtccttcgcctggaagtagaagaagaaaacggcagagccgttaaagtctatgagaaaaacggctttaacgtcctgccgtatatggaaatgaaaaaactgttataaccagcggtcacctagaagaattttacaatatcttctacattctttcttaccggcatttcaggtttaattgctccgtatcctactgcgatcacggaaacaacttcctgggatgccggaatttctaagtattcacgaagcttttcgctgttgcgaattcccatgatcagagtatctaagcccatatcttttgcctttaacaccaggttttcattctgcagtcccaggtcatagcagccccagccttcgccaacttcattttcagccacaccttctcttgtaaaaccggaacgtgttttttcaaaagcagtgatgatcagtgcaggagcatttgcgctgtttttctggttaaattccggaaggcagtcttttcttactttttccagcatttccggtgacattacaacataatatctgccggtctgggaatttttccaggacggagccatctgggcaaaacggatcagttcctcgatctgtgccttttctactgtctttccctcttcataagctcttaagcttctgcgcgccataacggtctgattaaattccatagtaattagcctccttgataactttttgcgtaactattcattgctttcacagttacctttttgctttctaatcagaagtataacatatccgcagccactttggaatatacatacaccaatcccttttgtctggagtttttctatgggtgcttttgtaaaaaaatggttccatctggttttgatctttgtttttgcctatctggcaggaagtctggcggggcaggctgcaaatcagttttcttctgctgaagagtctacaaaaaatgccgtttatgaaccttcccaaaagccagtggctttaactgaaaatggtatccccatttattctgcctctgctgacggcaactggggcttaagctttccctctcccggtcaggctcccgttggaaatacaacaaatgactacttaaagcagtttaatgcctgctatatgggagatcctggtgaaaaagtaatctatctcacctttgatgctggttatgaaaatgggaataccgcaaagatattagatgccttaaagaaacatggcgttcacgctgccttttttgtagtgggaaattatctggaaaccagtccggaactggtaaaacggatggtagaagaaggccatatcgttggcaatcatacctaccatcacccggatatgtcaaagatctctgacaaacagagttttgaaaaagaattaaaggatttggaaaacctatatacacaggttaccgggcagactatgaagaaatactaccggccgcctcagggaaaatacagcgaaaataacttaaaaatggcccaggagatgggatacaaaacctttttctggagccttgcctatgtggactggtatcaggataaacagccctcaaaagaagaggcattcaaaaagttattaggtcgtatccatcccggagccattgtactgcttcacagcacctcagatacaaatggtgctattttggatgaacttcttactaagtgggaggaaatgggatatcatttcgccactttagatgatatctgatattcctgactttatgactctggcactgcaactgctgtagctccgatcaactccagcttatcactgttgctgccttctctttttacatgagccgttttaacagcagcaccggatgtagatgtagccgtaatcgtcccctgggcgcctgccagttctactgtctcatccacaataccagatcctgcccctgtaaaagtaagatttccggcttccagacggacagcggaggggtgatctgcatccagctcttccccattccagtcactgctgattgcttccgcatctgctgactccagttccagacttccttctccccggatggtcagtgtacctgtgccctttttgatcaccggtccctggctttccaggtggcttatggtatcttttttaagctgaaggatcagatctccttctacttcgatcaccggttctgctgtatccagacttccggcttccagttcgtccaaggtcaaaatatactggcctctgctgttgcgcagcgtccagcctgcttccctggtggtctttccattttcagggatcagcaccttttcgccttcgatcttaacagaagtaagaggcacctgatttctggaggtagtcagattaaatttggatgccacaaacattccaaatgtagctactcccgcgcaacaggctgccaccagaccgataaacagaacagtacggaccattcttccaacaaattctttaggcagctgctgcatgttttgcttcctccagtctcttgttaaactgttcataaaaatccacggaagcatcaaatggctccatgtagaactttttcagaacatacaggcacaaagcctttgacttatcctggccttcacttccaaggctttttatcttctgtcccatttcttttgcaaaataatgccagtcagaaacgaatttttcatatttgccaaaatccgggatatcgatccatttacgcacctttaccttggtcctgttttccttcttacattcatgggtctgtaaaaaatactggaaagaaccattttcataacgtctccctaaagggaacagacggcaaaatcccggtctgaatggatgaacggagcatctgccttctccatttaagaaagaacaggcttctttttctcctgccattttcaggtttggcaggatcagaccatctgacatattcagttcgatccgaccctttaacagatcttcaaaagtcagccctgttcctgtacttaaacggtaaatgtcatagggatccagtaaaatagaggatcccattccctgacaacaggcagagcagcctttacaatctccgcagtctgcttttaccatatccgaggaactgtacaatcttccatcggatatttcttttaaatctatttcgcgttccattatttcttttgtttcctttcacacgccgaaatctttgacgataccggcaagatttccggctactgtaagtgttacgggcttacggaccgatggttaccggcacacccactgcacaataactccacagaatatccattacatcattggtcatggcaatacagcctgccgttccacgatctccctgatttccatggatctcaatagctccgcctaaaggagtatcccatggtggggtcacgcctgctttgtttgcatctacaatcgcctggtactgttcctgggtaataagaccggtggacagacctctttctgcatcctcaatatttggataggacagtccaagtgccagataatacttgctcttgtcatttctggtacatacatagaaactgccggaaggggtgatctcatccccctcctgcactttatcaccggtagctgactggcgtcccagttttgcatcccagacgccaatggcctgtttattctgcatcagggtcagcttgctctgacgtttgctgatataaatgctgataccggtagctgtcggggtgatggatgccggatctggttttgcagcagaagcctctgtattctgggcagtatctgtctgggtgttgcctgctgcactctgggtcgtatctgtattgactgaagagttgactgttgcctgagaggtatctgctgcattctgacctgcatctgtcaccttggttgcctgaccgcctacagactcaaccgggctgtttacagcaacgatctgctctgcaagcgcaccggaagcggttgtcacagccagtcccattgccagaaaacctccaagcagtaatcttctatatttcatctattacatctcctttgggaaaacatatatatttgcattaaattttctatctgctccccattttaccagaacacagcttttggagcaaccgcactttttttaagattttctgtcatttttccaatatatgtcatctatttctaaccatattcccttactctcctaccacctgcacctggcttccaacgccagtactgctgcgctttttggtaacaatgatcttacgttcgatcctgtctttcagctctcctacatgggagataatacctaccagtctctgtccctgcgccaaatcatttaaggaacggatcgcctggtttaaagagtcctcatctaaggaaccaaagccctcatctacaaacatggcatccagacggatcccccctgctcccgcctggatctcatcagaaagccctaatgcaagggacagggatgcctggaaagactcaccgccggaaagtgtttttacacttcgctctgttccgttgtaatgatcgatgacatttaagtccagacctgctttttctttcttactctcccctttttcctggcgttttaactcatactgaccgctgctcatagtcataagccgcagattagccctgcgcaggatccggtcaaaataagccatctgtacataggtttccagctcgatcttgcgctttccgctgagagttccccctgctgtatcagaaagtgaccgcatccacacatattcctgctctgctgctgccatttttccctgatttttctgaacattgttgtaaatacaacgattattttccagatctgcatattgtctggaatatttctcattccattccttcttttcttctgaaagaacagttatcttttcctggatctccccttcggaagtttcctgcatggacccgatctgggactttaaagtttctatggcagatctcagactttcagactgggcatttaaaacatttaatgtttccactgcctgagccagtgctgcttccagtttcagtttattctgcatttttcctttcagccggtcttctatttcttctgctgtaacagaaccatagatcttattttcttcttccagctgcttctttaattcttccagctgagttgccagcttctggatcagcagggccttttcggaaatattttcagaaagttttttctgttggtcttccatcgtttcagcctgggcctgtaaacggtttaagtattccgccttttttccattttcttccagatcagcttttatctgttctaaaacagtgttgttttgggcttttagctctgcgaaaaacatttttatcctggatacaacgttttctatatcatttgtgctctgtatccccggtacctgctgcatttcctgtatcttcggctcgtcctgcaaattttttatgcactgtctgatcaacagatccatctgcccttctgccgctgaatggatatttcgggcctgcagcagtttatcctgaagaatcttctcattggtctccaatgcctctttcgtttcctggcattttttaagactttccgctgccttttgggcatcctttaatttctgatcacagttattaattgcttctgacagacgccgtttcacctcaggtagactctctgcccctgcatccccaaagatctgctccgccttattccggtactgttcccacagttcttccgactgttccttaaactgccccgccaatgcacttagcttctggacattttcttctttctgatccaatacctctttcttctcatctaaaaattccttatccggcaccttatctgtaagtactgccggttttggatgatgatcggaaccgcagaccgggcatctctccccctcttttaaatgctttgccagaagccctgcctgggcatctaaaaatgtctgttccagatgaccataaatttctctttccctgtttcttacaacaacggcattttcatattctttctgggtttctgccagctttttctggaccagttccaattgacctgcctgaagcaaaaactcctgtaactgttgtgacttcatctgtaaaagaggctcatttcctgctgcctgcgccaaagcattttcctgctttatcatttcttccttctgcagcttccagttatttccagtcatttccagtttcagcacattttcctctgccgcctttttctcctttacagcctgatccagagctttttcatccccagtcagtttctccccttttcccatggcttccttaagcctgttttgcagccgctctttctctgcttctacacctttcagaccttcctgggcttctttattttcaagcagtgcctgttccagagaaactttctcctgttttaacttctcttccgtaaacttctcttctcctattgccctttcttttcctttggcttcctgtacttttcccagaaatgcctccaagccggcttttttctctctcagctctcttatctcttctgccagtacttcacagccctttgcctcttcttctgccgccgtcttttgagaaacagccttttctacctcaggttttagttcttcaaacagcttctgctttgcctccagatctgttttcatcttctgtctctgctttgcttccccaagaaccttattttctttctgtatctcttcctcgatcccatggatctgatctttcagacctgcaagtttttcctcctgccgtcctataacctcagccagaagttcaattccccgaatggtctttccctcaaatttcgcctttttcagctctttccattcactttctgcttccgggtcatcactgatgctgacgccatccagatactggctgatgctgcggcgcatctcatcatattctttccattttcccttcactgcctcccgcagcctgttctcaatatcctgatagatccctgtatggaagatctggcggaagatctcccctctctctgcagttccggctaaaagcagtttctggaaatctccctgggcgatcatggcgatctgggtaaactgtcggtagtccagtcccattaactctgtaatggcttttgtcacttctctggtcttggtcacaggctgccggctgtctggaaaaacaagttctgcctctgctttttgcagggtaaatcctgttcctctgccctttggacggagatattccggatttctggtgactttataatcttttccctgataaataaaggtcagctccacataagtaggcacatcatccggtgcatacttgctgcgaaacatccccgtttccctgacatttccgctggcttccccataaagagcaaaagtaatggcatcaaaaagagtggtctttcccgcacctgtatcaccggtgatcagataaagccctttttctcccagcttttcaaaatcgaccactgtcttttccccataaggcccaaaggcgcttataaccagttttttcggcttcattctttcacctcccggatgatatttcgcacaaactcttcctggatctggctcatgggctggttgttctgcagctcataaaactccatgaacagctccatttctgacttctgttctactgcctgggctgccgtaagctccggattttccctggtcctgcggttgtcatattccagctgcataatattggggtaaatgacccgcagcttctgcagaccgtctaaaacatcctcttcatcggtcaatgtcacatgaaggtaatcctcgcagtttccattttcataaaatgactttgcagtcacttccatatagctgccccggatctttcgcatatcccgcaggggatgcaatggaacagctgagatctccacatttcctttttcttttaattccaccacagtaatggatttttcctgacccgcctctgaaaaagaatatttaagaggtgtgccacagtatcgcacctggtctcttcccactgcctggggactgtggatatgccccagtgccacataatcaaacccatcaaatacagaagcgtccacattgtcaaggcctcctacggacacttcctctgactcacagcgcatggcgccggtgacaaactggtgggcgatcaacacatttcgcacatctgtatccacagccatatgggaaacagtcattttcactgcactctggtaatcacacactgcctctgcttctttttcaaattctccctcttcaaaagcatgacggactacagccggttttacaaaaggaagcagatggatgcacacttttccatatgcatcggtaaattccaccttttctgtctttccctcatacacaggcgccacgtaaataccgcttttcttcatcagccgtccgccgtaggaaacacgctccggtgaatcatggtttccgctgatcataaacacgattagtcccatttcatttaaacttgtaagaaaatcatcaaatacctgcactgcctctgccgccggaaccggcttatcataaatatcacctgctaaaatgatcccatctggctgatgctcctttgcagcttttaagatctgcatcaggatatatttctggtcctccagcatggaaaactcattgacccgctttccaatatgcaggtccgataaatgaaacaacttcatagtaacctcccgaccataatatgttctctcggaatctttctgtgcctgattttgtgagaagattttttgtcagttgtgcccaaatttctgaggcgtacgcggtgcgtacgttgatgaaattcgggtgcggctggcggaaaatcagccacaaaggcaggtacaagaaagactccgagaggacattaataaatccgtgaacgcgccgccggcgcattctcaatatgtatagcaaaaaggtgccgcaaaacatctcctcttttgcggcacctctcattccacctagtatctttccactcagtatctatttccagtttattatgtttattacttactgctctaactgcttcttatagatctcaattactttcttcatcatttccggacctggtgcgccgatggtcatacgcttttcaacgcaggtcttcatgctgatggcttcgtatacatcttcctcaaatacaggactgatcttcttgtattcctctaatggaagatcatctaaagcaatgcccttgtcgatgcaaagcagtaccagctgtcctacgataccatgggcatcacggaatggtacgccatggtttaccagataatcagctgcatccgttgcattggtaaagccattctttgcgctggcttccattacatccttgcggaacttcatggaagagatcataccggtaaataaggacaggcagcccttcactgtatcaatagcgtcaaaggtcagttccttatcttcctgcatatccttatcatatgccagaggaagtcccttcatggtagtaagcatggaaaccagggcgccgtaaacgcggccgctctttccacggatcagctctgcaatatccgggttcttcttctgaggcataatactgcttccggtgctgtaggagtcatcgatctctacaaaacgatattcattggtgttccagataatgatctcctcgctgaaacggcttaaatgcatggcaatagtagataatgcacttaacagctcgatcagatagtcgcggtcagaaacggagtccatggagtttaaggtaggaccgtcaaaatccagaagttttgcagtgtattctctgtccagcggataagtagttccagccagagcgccggagcctaacgggcagtaattcattctcttgcggatgtcctgtaaacgggaacggtctctggagaacatttcaaaatatgcgcccatgtgatgagccagtgttacaggctgtgccttctgtaaatgggtaaaaccaggcataaatgtctcggtgtttgcttccatgatcaccagaagttcttttaaaagatcctttacaagaacgtccatctcatcaatctcgtctcttgtatacagcttcatatccagagctacctgatcgttacggctgcgtcctgtatgcaggcgctttcctgcttcgccgatacgctctgttaaggttccttctacgaaagagtggatatcttcgtattcggagtcagccgggatcaccagcttaccgctgtcaagatcttctctaatgccttccagacctgccacaatggcatctctgtctgcttctgtaagaattccctgtttcgctaacatctttacatgtgcgatgctgcctctgatgtcctgacgataaaatttctgatcaaatgaaagtgattcattaaaattctgtaccagctggtctgtttcttttgtgaaacgtccgccccaaagcttcataattgatgtctccttttgtcctttaatttataatctgcatgtcctttcggaacatttctgcatgtatgataccagattgctacgtgctttgcactctcgcaatctttaaaacattcgtaatccgctcatttttctttgaaaaatggctacttactcatgttttacgtgcctcaagttccaaaatcctcctgcaagcaagcttgcgttggattttagaccttttgacacttggtatcattataccttataaattcacattttgcggctattttttatatttttgtcttttttttcttatttttattatttacagtagtaatgatcgctgctcctgcaaacactacaaggctcacacctgtaataatagcacctgtttttaaaccttccggctcataggtaaaggaaatttcatggtctccttctgccaggtctgctgcaataaatgtatcaaaaacaggtcttgtttccgtttccacaccatccacaaaaagcttccagcccttgtcatatggaatacttgtaaacatggtcttatatccatcagaatgaatggttccggaaagttctgtatccgtccatttagtcaggttgatgggattttcattcattttatcataaaattctttaaaggcttccggatcaaaccgccatacttctccctgaagggaaggatttccctcatcctctgagcgaagttctacatccgttccctttacaagatatcccagttccaggaaataacctctgtctacattgtcaaaggacctgctcttttctcccatggttgctgtgaccttttccactttcttgttggtcacatacacataataatcaccggaagtttccactgtaaaggtaagtttcttgccttctgtaacactttcattggacaccagcacatctttggtccccagcacattgcaaaggtcattctgtactaccgcaggattgcctgagtctaacagccagttattctccacatctgcgggaagcataaatgctaccggcagcgtattctgattttcataaagccacatagagccttttctgctgatctgatcctttaaaccagttaccggctgctgatccggataaatgccatatcggatagaaaacaggctgtctaccaggggagtacttcctttaatactgtaagcattggtggaactttcgcagcccagctttctcacaaaatcagttaaagaagcatttgctaccgatgaaaacagggacgcagatggaaaattcatccacgcaccatcatttttcgtcttgctgtctcccttttccactctgtagaaagtatcacatttaatgctttccgctaaccttctggtatcctgattgtcctttacatacgcagtcctgctggtagttggaaggctgctgacaccaaggtttaacgcagtttccactgctactaaaagcagggtcagcatcatgatcacatcttcattccagtttttccgcttatacagataaataagccccatatacagtgccaggaaaatgatggctgcataaaacacagaaaaatgaaattgtgcagagttatccacaagtttctctgccatgagtacaaagataatggcaccccagaacgcccacaccacctgtttccaggaagtttctttcaattccaggcagacctgataacacatagtcagcaccaaggcgatatagataaaggactgtctgcatggaaggctgtttggataatggaacccatgccagatgaaatttaacacattgatggaaaagctggcataaaacattaacagcaggccgcagtaaactgccttttcccgcactgtgatcttctttgcccccagataaagaagaaggaacataagcactgccacaccgcagtaaatattgggccagtggtccaggccgatctctgttcccacatttccaatgtgacgggcgatcatatcaaaaatggagaaataacagctgatggtctttggaaaatcaaagtcgccggaagcagtcgcctgcaaagcatagatctcaggcaaaagcacaacggctgccagtcctcctgcaagaagagaataaaagccaaagcgcactcctgttgccaccaggtcttttatcttctttggcgggtataagatcacctgcacgatcacatacatgaccatgaaaatacagatcatgatagagatatagtagttggacagaatagaaagacccagagtcacacagtaaaacaggccctttttctcctgcaccagctgctctaacccataaaggatcagcggcagcaggaaaatgcagtccagccacatgatattccagctgtaagctgccatataaccgcttaaagcatagaaaatgccgaaaacaccggctacaaaatgcttcttctcaaaatgatgatccagataccaggtaaacgtcactccgcagagacctgtttttaccataataaggatggtcataaattcaatgatgaatttcttcggacataagatgatcagccagttcaccggacttgccagataataagcataaagagccgagaaattcactcccataccaatatcccagctgtatagcaagcttcctccctgttttagcttgtactgaaactcagaaaagaagggcgcgtactggtgatacatgtccgttcttaaaaagcactcttcaccaaaagggaagatgcctctctgggcaaacaggatgatcaggacagctaccggcacgaaaaaggctgcgatcaggccatcacttggacgcaggaaatggaagtaaccattttctatatcatcctccagatccagttcttcttctgaaactgccgtctgctccttcgctgcgctttcagggctgtcttctttttcttctttctcttccttctctgtttctatttgcatttcttcctgtaatggatcattttcctgtaaattttcctgcaaagatactgtttcctccctgcctgtatttttcaccggaaccggtctctggactatttcaaggacctcatccagttctttttctacctgttctatttcttcacgactcactgcattcacctttctttatagccgcttttatatattatttccagttatttctttttaaagatccaaagtttgctgaatacataatttgcgaccatattgataacagaagctgtcaatttacagaacatctcataaacaaaccctctgtctccccccagttttaccatcacaaccattaagacccaggtagccactcccgaaatagcccttgccgcaaaaaaggcaccgccttcttttaataagtacgccggccccatgttaaaattccggaatacgatgatcttatttacaatataagcaaataagactgctgccacccaggaaagagcctgggacacccctacacccatggacattttccgaaatgctgtataggaaacaaaatccactgctgtagtcagcacaccacataccagataactgatggtttcatagtttacgcattttttccataattttccaaacacgatttttctcctgtttctgatcttaccattttttctctgaccagttttttctattatatggtagccgttcttaattgtaaagttaattagcgtttaatctgttcaccaaactataaatgttttgaaaagaatggttatctacgttataatgttcacatagaaaataaccagaatatctggaggaattatatgaatctttcctatttaaagtatgccgtagaagtagaaaaaaccggctctattacaaaagcagcccagaactattatatgaaccagccccatttaagcaagatcatccgtgaactggagcgtgatcttggatgtcccatctttgaccgtaccagcaggggaatgatccctactgtccgtggagaagaattcctgcgctacgcaaaagggatcatggaacaggaagcccagttagacaagctctgctccagaaataaggaatgtccccgtgaaattcgtctttgcggtccccgcgcttcttatatatccagcactttaaagaattttttaaaagaagatgaccggctttttacaaccaatgtgcgctataaagaaacgaactccaaggacgtggtccgtctggtctcttccaaagaatttgacttaggcattgtccgctgtcaggtactttacgaaccatttttccttaaaatgatacaggatgagcatttggacagcaaggtcttatggcagttctctcccaaggtacttatgtccccctcgcattctcttgcaggaaaggagcctttagaccaccttgatttttcccagtccgtagaactgcttcagggagatatccagtatccttcttttaccccggaaaatactgactgtgtccttccggacagtgatccccgccataccatttatatttatgaccggggcagccagtatgaatttctccgccatcttccaggtgcctatatgtggacttctcctgttccgtacagcacccttacagaagcaaaactgatccagagagaatgtacccgcccggataatgtattcaaggaccttttagtctgtcgcagcaactaccgcctgtccaaagcagaaacagaactgacccagtggctgggccgcactatcagccagctgtctgactaactggctgctctgttttgtaagaccatttttatcaggtcttaaaatatcgtcttgaaaataacaatattctcagtaacagagctggccattttttcgtttatttttctgttactgagtatttttttctttctgctttatatttttattcacatttcacaattttcttctcattaaccagtgatatacttacaggaatactattattccatttttgcatctagtcaagcttttatcaatgtgctactatatagctgttaaagaaataacgaacagatacatatagtcaatcacacaactatatttttaggaggtcataattatgagattcacattaccaagagatttataccatggaaaagatgcactggagtccttaaagacactgcctggcaagaaagccattgttgttgtaggcggcggctccatgaagcgtttcggtttcctggataaagtagaagcttacttaaaagaagcaggaatggaagttcagttatttgaaggcgttgagccagatccttctgtagagaccgttatgaagggtgcaaaagctatgcaggaattcaaacctgactggatcgtagctgtaggtggtggttcaccaatcgatgctgcaaaggctatgtgggtattctatgagtatcctgataccaagtttgaagacctgatcacaccattcagcttcccaacactgcgtacaaaagctaaattctgtgctatctcctctacctccggtacagctaccgaagttactgcattctctgtaatcacagattatgctaagggaatcaaatatcctctggctgacttcaacatcacaccagatgttgctatcgttgacccggctttagcagctactatgcctaagaagctgaccgcacatactggtatggatgctatgactcatgcgatcgaggcttatgtttccacactgcattgcgaatacaccgatccattagcactccatgcaatcgaaatgatcaacgaatatctggttgcttcctacaatggcgatctggatgcccgtgctaaaatgcatgacgcacagtgcttagctggtatggcattctctaacgcattattaggtatcgttcactctatggcacacaagaccggtgctgcttactccggcggacatatcgttcatggatgtgctaacgcaatgtacctgccaaaggttattaaatacaacgcaaaagaacctgaagcagctgcaagatacgctaagattgctaaattcatcaacctgccgggaaatactgatgaagaactggtagatgctctgatcgcaaggatccgcgagatgaacaaggatctggatattcctacctgcatcaagtactatgaaggcggaatcatcgatgagaaagaattcatggagaaactgcctaatgttgcagaactggcagtaggcgatgcctgcaccggctccaacccaagaagcatcaacccagatcagatggctaagctgcttaagtgctgctactatgatgaggaagttgatttctaattcataagggatctgaaaaattcagaattcaataaaaactttttaagggctgcagaaaatgatctgcagcccttattaattgccatgcactaaaaaactgcccggtcacatttctgtcaccaggcagtttatacgtttttatgactcacaaacccgcacctaacggtgctctactgtctgctacgcagacggtttgctcatgaatggatcattccatcccttttaacagcttctcaacacttgaaagctttacgcacagtgcaaacagctctgtagccacgatcagatcacccagaggtggataggttggtgcgatacggatattactgtcatgtggatctttgccgtatggataggttgctccggcagaggtcataacaactccggctttcttgcattttgctacgatatcttttgcacagccttccatggagtcaaaggcgatgaagtagccaccctttggtttggtccactcaccgatgccaagaccgccaagttctctttccaggatctcttctactgcttcaaattttggacggatgatatcggcatgttttctcatatgctctaccattccgtgaatatccttgaagaaacgtacatgacgcagctggtttactttgtcatggccgatggtctggtgctttaactgagccttgatgtcttccaggttgttgtgggaagtagcaatggctgcaataccggaacctgggaaactgatcttggaagtagatgcaaatttgtaaaccaggtctggatttccggctctcttgcactctgcaaggatctcgatcagatgatcctggtcatggtcatacaggtgatggatgccgtatgcattatcccagaaaatacggaaatcaggtgcagccggttccagtcttgcaaaacggcgtactgtttcatcagagtaggaatatccctgtgggttggaatacttcggaacgcaccagatacctttgatggcaggatcagtggaaaccagttcctctaccatatccatatcaggaccttctggagtcataggaacattgatcatctcaatgccaaaatactcggtaattccaaagtggcggtcatagccaggaaccgggcagaggaatttgatcttatcctgcttgcaccatggagtatttcccataattccgtgggtcatggctcttgaaaccgtatcatacataacgtttaagctggagtttccataaatgataatggtagaaggattaacctccatcatatctgccagaagttcttttgcttcatcaataccggtaagtactccgtagttacggcagtctgtaccatcttcacaggtcaggtcatcatcactgctgagcacgtccatcatacccatggacagatccagctgatctgcacttggcttacctctggacatatccagtctcagatcctttgtctgaaaatcgtgatattttgccttcaggtctttgcgaagggctaccagttcttctttggtcatctctgcatacggcttcataatttcctcctctatatgtgttcttaagacagacatatgtcagtgctataaaaacattttctttcattgctataaaatatacaccaaagtatttattccgtcaacacaaaatttccttatgaagctaaaactttgacttatggttagatgaaactatacatatttttacttataacctgacaaattccccggtaaaccggggaatttaactgtataaatctcttttactttgccagcagttccttcaacagtttatttaccattccagggtctgccttgcccttcatagccttcatagtctgtcctaccaaaaagcccatggctttttcttttccgcccttataatcggccacagactgcggatttgccgccagaatgccttcaatggtggtctttaaggcgctttcatcatttactaccttcaagcccttttcttctacataaacggcaggatctacattgtgctcaaagatctcttcaaatacggtctttgctactgtacggttgatctcgcctgctgctaccatctggatcagctttgccaggtttgcaggtgaaaagcccatatcatccggatccatttcatgttccttcagtaaacgcatggcttctaccatcagccagttagatgcatcttttggctttccgcaaagctttacggtctcctcaaatacatctgccatatgcttggagtttgtaaggatctccgcatcatactgaggcaggtcgaattcgctgatataacgggccattttctcggtacgaagctctggctgtgccgccttgatccgggcgatccactcatcactgatcacaacgggtgtcaggtccggatccgggaagtaacggtaatcctgtgcatcttccttggaacgcatagccttggaactttccttgttgtcatcccaacgtcttgtttcctggatgaccttcttgccatcttcgatcagctcgatctggcgtcttgtttctccttcaatggcatgtgcaatagccttaaaggagttaatgttcttcatctccgttctagtgccgaattccggtgcgcccacttcacggacggataagtttacatcagctcgcatggaaccttcttgaagtttgcagtcagaagctcccagatactggatgatcagacgaagcttttccagatatgcgattacttcctctgcgcttctcatatccggctcagaaacgatctcgatcagcggaacaccgcttcggttgtagtcaactaaagagcagtcttcccactcgtcatggaccagcttgccggcatcctcttccatatggatctcatggataccgatctttttctttacaccagactcagtttcgatctctacccagccatcgtggcagataggcaggtacagctgtgagatctggtagttctgtgggttatcaggataaaaatagtttttacggtcaaatttgcagtactggttgatctggcagtttgcagccagacctactgccatggcatattctacaacctgtttatttaatacaggcagagaaccgggcataccggtacacaccgggcatgtatgggtatttggcgctcctccgaaagcggtagagcagccgcagaatatttttgtctttgttgccagttctacatggacttccagaccaatgacggtctcatactgtttactcatggcttactcctccttaatcagatacctttgccagttcaggcatttcgtattttctggtacactcaaatgcgtaacctgcgcggattatatccttttccttgaagcagtcaccgatcagctgcattccaataggaagtcccttggagtccagaccacatggaacggtcattccaggaagacctgccaggttgacagaaatggtgtaaatatcacccagatacatctttaacgggtcacttaaggaagaaccaagcaatggagctgtatcaggagatgcaggagccaggatcaggtcatattttgcaaaagccttatcaaattctttcttgatcagggccttggtacgcagggcctttaaataataagcgtcataataaccggagcttaatacgaaagagccaagcatgatacggcgttttacttccggtccgaaaccttcagaacgtgttttcttgtacatgttgtgaagaccttcgtattctttggtacggtagccatattttacaccatcaaaacgtgaaaggttggagcttgcttctgcagaagcaatgacgtaataagcaggaatagcataatctactaaacctaagtcaaatgtctctacaacagcgcctttttcttttaaaatatctgctgcctttaagatcgctgcctttacttcctcatccagtccttcaccaaaatagcttgacgggataccgatcttcattccctttacatcatcctttaatgcagaggtaaagtcacagtctgtacgggccatggaagtgctgtcttttaaatcatgggaagaaatcgcttccagaatagctgcacagtcggaaacgtcctttgcaaccggtccgatctggtccagggaagaaccataggcgatgaggccgtaacgggatacagttccgtaggtgggtttaatgccggtaacgccgcagaaggaacttggctgacggatagaaccgcctgtatcagaacctaaggcataaaagcactcattagctgctacagctgcacaggagccgcctgaagagcctccaggtacatgttctgtattccatggattgcgggtcacgccataagcggaagtctctgtggtacttcccatagcaaattcatccatgtttgtctttccaagaataacggctcctgctttttccaggtttaaaacagcctctgctgtataagttggcacaaaattttcaaggatctttgagctgcaggtagtgcgcatgcccttagtacacatgttatccttaatagcagccggtacacctgccagtggacctgtcagtgttcctgcctcgatctgggcctgaacctcttttgcacgcttcatggctccttcttcgtctaaagtcacataagaatgaacctgttcttccactgccttgatctgcttgatcactgcttctgtggcctgtggagaagtgatctctccggcctttatcttctttcccagttccagggctgttaaatctaatatactcatctggccgcctcctattctactgtcttaggcaccatgaaagctccgtctttctttgcaggtgcattagcaagtatctcgtctctgtcatccccgttggtcactacatctttacggaatacattatttacaggaaatacatgggacataggctctacgccagttgtatccagttcatttaatttatcaatatagtcaagcattcttcccatatctttttttgcttcttctttttcttctggtgaaagctccagctttgccagaatgcctacatactctatggtctcgtcactgatcacatttgccatggtttcgtttcctttctgaacctgtttcttctatataaatgcaactatatataagaagtttttggaattttttataagtttttcttatgatctatggttccagtcttgttacatctcttgggaagagcgctgtctctcttacgttctgctcatctaaaagacgcatggtcagtctctctaagccgattcccagtccaccatgtggcggcattccgtatttaaagatcatcagataggaagcaatgtcctccgggtccattccacgtttttccatctttttaaggatctcgccgtaatcgtgaatacgctgtccgccggtggttacttccagtcccttaaataacaggtcaaaacttagggtatatttcggatctgccgggtcatccatagcataaaacggacgtttctttgatgggtaatgggtaacaaatacgaaatcactgccgtattcttctttaaagtaacggccaatgagaagttcttcttccggctctaagtcatatgggtttctgatccgtctgttgtacttttcagataccagctcttttgccttatcaaaacggactgccgggatcttgcttacatccggaagagtgacacctaacatatccaactcttttttgtactctttttccagaagtgccatggtgtactgtaaaaatccggtctccattgccataatatcttcaaaaccatcgatatagcccatttcaaaatccaggctggtatattcgtttaaatgacgggtggtgttgtgcttttctgcacgaaacacaggagctgcctcaaatacacggtcgtaaacgcctaccatggtctgtttgtaaaactgtgggctctgtcctaattctgcttttttgttgaaatagtttaatttgaatacgttggatccgccttcagcgcctcttgctacgatctttggtgtgtggatctctgtaaagccctgggtaaataaataatccctgaagcctcttacaatgccttcctgaatcttaaatttagcacgttctcttacgtttcttaaagataccgggcgcagggccagctttgtttccagggatgtgttcattttccatttgctgatagggattggcattggctctgcaggctgggataatactttgatctcttctaagcggatctcaaaaccatgaggagctctttcttctgccttaacagtaccaaggacttccactgcggattcttctttcaggtcgtggatatcaaaatttgtgacgccttcttcgtatacgcactgtaccagtccttctgcttttcgcaggatcacaaaggcaacttcacccatgtcacggacattgtgtacagcaccattcatacggatcttttttccttcataggaaccttctaagatctgtgcaattccaagtgtttcttttgctttgacgccttctacaaattccatcatatttatttctccttcccaacggtgtactttgaaagtacatcttacggttccggagatttttgtataaaaaaacgccccggaacacatttactgtattccgggacgggatcttcttttcccgcggtaccacccgcattgagaaaccttcaggatgctcttaagacttctcctctttttcgcatgtaacgtatgccacggatatacctactatcagtccttccagccggttgcatccccttctggtaaaaccgcttcgatataccagctccagagtgttccctttatccagtcctgcgcggcggcgctctcagtcggtgacgcccccttcctgttacatttctcagacaagagtctctttcatagctgttttttatttgttttataaattaatactccaaaagcagaaagtcaagatgtttttttgtatttgtctaatttttgttgatttttttaaatactgtcctctcattgacgttgctattgacaaatgatacaatgtcatagacttgaaaaaacaggaggcccccccttttatgaattctcttgacaaacgactgcagatgtccggcttcatcactttttttctaagcggcatctgctccatcagcagcggtattatagtaagcctgctgcaggaacgttatggatttgactacaatgtaaccggcacacttttgtctattatgagtattggaaatctgatggcaggttttgccaccggagtccttcctgcaaagatcggacttaaagccactattattacactaagcgcaggttatgaactgggatatctgtggctagggatttccggctggatgagcattctggtgctttctttccttctgatcggctttgccaagggaagcgttatcaatatgtgtaccatcctggtaagcaaccattctgaaaaccgtgcaaaaggcatgaacatcatgcattcctgttatgccttaggagctctgatctgcccctttgtaattgccggggccggactgatcggacctgtagttcccatgtttactttaggctttttaggacttatcatgtggatcattttccatctgacaccatttgaaaagaaaacagctggaaaaaaagaaaaaacagactggggatttttaaaaagcaaacgtttctggctccttacaggacttatcttctgccagaacgcagcagagaccagcgtaaacggctggctggtaacttactttaagggaagcggcattttatccggtactttaagcgcctacaccgtgactgttatgtggactgccacactgatcggaagacttctgattgcctttgtattccctcttaaaaatccatacacagccatgatcaaaatgggcattggctgtaccgtattttacattggactgatgatggcaaacaaccaggtagctgctattctcctgcttttcgcctttgctttttccatggccggcatgaacccaactgccgttgcctgtgccggaaagatgaccagcgtagccagcatcggtgttttactcccggctgccagctttggcggcatcctgatgccatggatcattggtattgtctccaacattgcgggactgaaaatgggtatggcaatgaatattatttcctgtgtgggaatgctgatattctgtatcgctgtaaaaaacttaaacgaagaataataaatattttccccgtctttgaccggcggggattttttgaactttcataacgtcctcattttcctgtgtttctttggtatttcaagacacgaaaaagaccggtcggggaaccggtctttctcaggagaaggtatttcgtttcttatggggtgtagcaaaaactatataatgtattggggggttacgcctattataatagcataggatcctcaaaaagtgtgcacaaagtttcgatttttgtcttttttcttttatgcattttatccaacaactgtttctgacttttcttctttctggcgtttaggccacttttcctccggctgctggctttttttataaaagtactggataatgtcttttcgtgtaataataccgataaaacatttctggtcatctaatacaggcacaaaattctggtttaacgcttttccgatcaggtcttccatatctgcgtctgcctttaccggacggttgtccagtctgcgcttgatggctgtaatggggatcttctccgcacctttcagatccagatggtactgatttttgatgccccaaagcagatctccttctgtcagagttccgatatagcggcctgttctgctgataatggggatggcagaatatttgtggtactccatcttttccaaagcctgtcttaaggtatcttcctcactaatataagctacttcgcttttaggagtcaggaaaaataaaatgttcatctcgatgctccttttgttattattctaaaaggattataccttaaggctctgaagcttcagtgaataatttctaacatttttcttaaattgttgatctgatctcttttatctgatctttactccatctgatccagtggatccagtgttttttcctgatgttttaattcaaaaaatacattcacaccttctacggaataatattttgtaggttctgccacgtatcctaagatctgccctgcttccagatactcacctggaacagcggaaatttcctttagctgcccacaggtagcagtgtactcatttcccagatccagcacaacaaagttgccgatctcttcattggaacctacttccagcacctttgcatttgcgggggctgccaccggatcactgacctctgcctggatcacaatgcccggattgcatttaaactggtccagagtggggaaataaatcgtctggtccatactgtaatccaggatcacattcccccgcaccggccaggtaaggacactggtatctgaaaaatttaataccagggctttggctgcctgttttcctgcacctgcttctgctgcaagatcatccttggtgtttggatttttctcttctttttgtgcgtaactttcctgtggtacctttgacgcttcgatctcagaaattttttcttctgccttttcttccttctgtgcagtttcaggaacaccgtcctgtgcgataatttctcctcccggcacttccagataagggctctgtcccttttcatctgtgttgctgaccgtaagtacacctactgctgctaccgccgtaagcaggccgatcaccatcatcaccagaaaaagcttatctttgaacatctgatttactttatctttcaccttttatcacctcggtagtattcttaccatttcagtgtgctttattcagtgaaaaatgcaataccgctgtaaaaatattccagtatttctttaaaatcccagccatcttctgcttttgcctctgcttcattctggctcagtccatagccatgtccctttccttttactgtaatgccgatcccgttttcctggggttctgtaaaaaagcaggaggaggaaagtccaaatgcaccggctgcttcctctccagtaaaggaacattcatcaatctggatctcctgtacatacccggctgtatctcgttttacagtctgcactttccctggaaatgcttccgggcggacctgtctcacttccccttcttttcccgggatttcattcagggctgctgccgcctgtttggcagataaagatacaaaactgataaaatccgctgctttttcatcatcgggacaggaaactgacttcagatacggatatccctcatccccatccctggtagaaccggcggtgacggcgcaaaaaagaggagcgatcatctccccatcatatgtcatcacaattctattggtctggatcactgcctcttccagacggctgtatttttccggaaattccgtttttccccatatttttttcagctcttccctcggtttccggtccagatccagacttaattccgaaatttctttttcttctcccatctgcctgcggatataagtccttgcgatcactgcctgggctttgagcgcttccatttcactgtccggcgagatctgagctgccagtaccgatggcaggtattcttccaacgacaggtaaccgccattttcctcccggtccagaaggatcctgtattttcccgcagcttctttttcctgctgccttacatattctgccccgtgtatatttcccgttactgccagtaccgtcccataggggatcagaaaaccggctgcaaccagtacgaccatccatttttccataaaaaatccctgcctcccatatatttatcatcatcataaatatatggagacagggttccaaactatccttttttatcagccaatataagcctggatcaggcggaaggtgttttctgccccatctctgtggcttcgttcatagccatgggaagcatacacaccaggaccaatgagagcatggcggatatcatttcctgcgcgaagtgtagtttccacatctgaaccataatgaggatatacgtccactgcaaagccaatgttattctcctttgccagctggaccagacggcttacgatctcataattataaggtccgccgctgtcttttgcgcagatagaaacttcccgctctgtacacatcaggccttctcctacacagcccatatccacagaccaggcttctgtcacgccatccggcacagaagcactgcctccatgtcccacttcctcataaatggtaaaatgagcataaacagcacgctgcggctctatcttctcgtcttttaaatattttccatatgcaagtaaaatggcagctgaaagtttatcatccagaaaacggctttttatataaccggaggatgtaactcttgtccttggttcaaagcacacataatctcctggcataatccccagttttaaagcatcttctttagagcttaccggctcgtctataagaacctctactgtatcccagtttcgttcagttttttcataatctccgtttacatgaacggacgcattcactaactggcatacaccttcataaataccgtctgcctttgttatgatacgcacattttccgcctctgcattagccggtttcatacctccgatattggtaagacggagacggccatttgccttaatttccgctaccatgcctcccagtgtatcgcaatgtgcctccaacagaataccatcttctttgttctttccgccaaaagaagctacaacaccaccttttacggtgcgtttcgcctggatccccagacgatctaattcctctaacagataatctgttacctggcggcaatagccggaaggactgtcaatggacaataatttttctgcctgttctatgatgtaatctgtatattttctgtagtctgtcatgtattatttttcctctgttttctgtttatgtcctctcggagtctttcatgcacctgcctttgtggctgattttccgatcatacgctccgctccggacatcttctgtctcttcctcttaacttataataagcatttttttctgcatacatcctctgttctgccgcttttaacatagactcaagcatgccttcttttttccattccagtcccatggaataactgatatgtgcctgctttaaatcttcctgtacctgctccatctgttcctcaaattctgcctttcctgactctggaagaatgatcacaaattcatctcctccaatgcggtaggaattttccggaaatgttcttaagatttcttttgcagcatcacagagcagccggtcccctgcttcatggcccagattatcattgatctgttttaaaccatttaagtcaatataagcaacacctgtgtcgcatacaggatatttttcaaaagtttccagtactttcatgtacttattgcggttatagagccctgtaagcatatcacgaaaacttaaaaactgcaaacgttcctgctgtctctgggaagactggctgtttacaataaaatactggagagataataataaggtcgcatcatcaaaatgaacctttggattgtccacaccaataaaacctgtgactttaccgtttttctttaaaggaaccgttaaaaggcgcttgatattctgttccactaacatttcgtaggtgggatatcccttttcctgttctgcatctgcaatataataaacctgaccattttcaaacttatccatccacactgcaattacactgagaggaaccgactggagattgtcgatctgacgggtcacgccttctgctgtatattcgtatgtattgatcacgatctgtttttcatgatcaatatcaaaaatataacttctgtctgcctggaaatactggttgatgatccctaaaagattatagatggctgtatggatatcacggtccgcagataattccaccgcacacttgtttaaagtagtagctacttccaactgatggatcctctctttattggacttctccatccgtgcttttaaactgccaacgatcaggatattggcaatgatcccaaaaatgactaccattatcttatcacgattggaagcatcaaaatagaaaaaactgtggtccgttgaaaagaaatacatagaatagatgtatgtgataaacccacagagcataccggctccgtatccaaactgtaccagaaccgcggacaggatcacaaacagaataatattgggattggaaatgtcaaatttattcatgatcacacaggccagtacctgcaaaatccccgtaattaagatccatttatttttttcatcctgtacgacggtttccagctctttcataatcggtctcctctctgtatctgtttgtagtgtattgctctacacgtatagtataactatattttacaaaaacaaagaggatttttcaatattttattcgttttgtaacgtaattatattgtgaaaacttattgtaagatcagacatacaagcggcagtgtgaccagagaacagatcgtggtgataaagatccctcccatggcatattcactgtcagagggcgttaccatcatcgctatagatgccataacaggcattcctgcgatcagtgcgatcgtcagtcttacatcccctgctattccaaaagctcccatcataccatacatgatcatagggacaagcagcatttttgcaaatacgatcccgtacagttcgcccctgcgcagcccgtttttcataggaacacaggcaaagattccgcccagatagatcattgcaagaggcgttgctgtagaaccgatcttttgaagtcctgtatttaacaatgtaggcaatttaagccctgtaaggatcataaagagcgccactataattccaatggatgccggattgaccagtttcttcagatcaaattttccttctccttccggagctgtcagttttactcccagggtccataaaaacagctggtcaacaatggaaaataccgacacgtacaaaatgccgttttccggataaatactggtgataatggggatccccataaatccgatatttccaaacatgctcatggtctgatagatctgcgccgtttttccttttacgtgaaatatccgtgcgatccccatactgataaaaaacatggcaacataaaacagaaatgctgacatcagaacagaaccggaactcaacagaacatttctctctaccccattaataatattcgtaaagataagcaatggaagtcccattcttaagacaaattttgatataggctgtaaggtctccctgttaaacaacctgctttttaccagtatcacacctgccagaatgtaaattacaaatagttccatctgttctaacagaatccaaaatgtactcatgttatactccttcttttcccccgcatattcgggacatatttataagtataccacgattttccagatcctgtctgccagattttccttatgcttccatgatcccatagccaaactgataccatttatgatgctccgggataaagaatgccacatccggacagttttctttgatattctggcggatcacatccagaacaccttctgcattgactttatctgccggaagtttcatatctgctaataactctggctttgctgcaaacaaggtttcccagatatcatagtgatgtggaataactgccttgggattaatagcctgcaccagtcttgcaaacatctggtgatcctgttttgggctgacatgcataaatgcgatctcatttccactgtatttttccatgcggtggatctgctcctctgtggtcattccaccccagacaacggctctgtatccattaacatcggtaatgcggaagttgtacatttccagggaaccataccacatagtttctcttctgcttccgtccttctgaatgcagtaacctctatcccagtaatttccgcctttggactctgtatgtctggcagagatcacttcgatcttcacatcatcaaattcatattcttccccgccacggatacggaacagacgttctacattcaggtcatattccttacacaatgcttccgcagacagatcccccacaaaaatagctgcctgtgggaagcgcttctgaatccgtccgatgctgtctgaatgatcgtcatgtgtatgggtgagaagaacataatctgcccgttcgatctcatcgatactgatgggatagatctgtgcctcgtctaaccatggatctactaaaagatgttttccgctggataactccatttcaaagcctgcattgttcagccatctgaatttcataccttttcctgtgatgttcatgtgtctggttcctctctgttatgatttatatgatagatatacttcttgtacttcagtataaaacttttgaggctcaagtgcaacgttaaacttaacattagaaccagaaataaaacaaaactttatctgtaatcacacctcttacactggatcatttcattttcactatcctctttatagaatactccggcccaacggcagatgctctgcaaaatagggatcacggaatttcctttttctgtaagactgtattccactcttggcgggatctcatcgtaagactgacgctttacaatgccatttgtgatcagttcttttaatgcagctgccaggactgcatctgtaatgtttcccatttcccggcgaagttcactgtaacgcagtacttccttcgctgccagtacacagataatgcgggaattccattttcctccaaatacttccagaccatattctaacggacagcggatgtctttttctatttttctcttatacatatctctctcccacacacttgtatcttcctgcattcacaggatcggcttttacagctttatcacattataatatagcgtcattaatacgcagaaggcaatagaaacaggcagtgttttctttacaatatctcctaacgtcacatgaaaatagtcggctgccaccaccagacatacatgggtaggtgagatctggctggctgcatgggccatgcacataaggtatgccattaagggggcgcctcccggaatagctgcaaaagccagcggtgttcccatagcaatggcacctgtagaaccactgatgacagttgctgtaaaaaatagcagaccaaaaatcagataggtaggcagaggcagttttgccatagcatccggcagcagcaataacacacctgtatgagcgatcagttctttcagacataatacaagaaaggtatttcccaacatcttcttttcaaaagcagcaaaaataaatttcctgatttcatccagtgttacccgataaatgataatacaaagtgcaatggatacaagaacagacgttacaacctgaaaatgaaaaactaatatcaatataaggataagaagcagtgaccacaaatgctggatcaaatgggcaaagtctgccagtcggttggtgcttgccggtgtgccggtatcattggggatgcggtgcagataaaccgcatatcccagtcctgccagtgcaaggaccggaacgatcatatatagaatgaactctgatatctccactccagaaagatttgacataagaagtactgctgtataagtaggcagcacactttccggtatgtgcctgaaccagctggctgtaaaagcctgctcttttggatctaaatatccctctgtcgcatcctttacaatatctgcacaaaggatcatggaagccgcagatggcagaagtccaatgaaaaaagctgctcctgctgtattgatacggcggttatgaaaaataccgttcagatcctgttgtgccagacgaatctggctgcgtgactctaatatcctctgtaaaaatgtgatcagatacaaagacaataaaacagataaagatgaccagttgataataacactggctattttagtcacaattactgttaccggaatatgaaacagccctgctgttacgatcattccgcctgcaatcgcctgatacagcggtctgcctatggctaaaagaactataataaccgcaaataccacgcctaaaaaagtaatttccatgatgtgtgttcctcctgtgtatacgatatcctcccggattccttcatgtactcaagtttacatgcatttctcctctattacaagttagcgattattttattagtcactattaattttcatagttactgtcaatataaaaagggctgacacagcagcccccggaaaatattcttttattcgatcgtaactacctggctacgcttaaatgcttctggtgcgatctcatttccaattcctggaagttccggcactgtaaatgatccgtttaccggctcgtaatgatgcagcgcaagtgatgtcatctgtggcatttctgtattcacgttatattcatggattacaaaattaggaagtgctgcttccatatgtaaagaagcagctgttacgatcggtgttccacatacatggatctggacaccggcttcatatacataggacatatcacagatttttttcacctctgtaacaccaccgctgtttccaagatccggctggatcacctgaatggcttgtttatccaacattttcttaaactgccatctgctgtaaatccgctcaccgctggctactggaattcccgtctgctgatgcacataagcaagtgtatcctcgtgagggactaccggctcctcataatagagaatgccatattcctttgccatatttccaaactggactgctgactgggcatctgtataacaatggttttccaaaataatatctaccttagaacctaccgcttctcttacagctgcgatcctcgcttctgccaaatccaaatattctggatccagataagctgtctgctctgttcttggatatcttccttcatcttctctaaaagtaaggaaattgtattttactgctttaaatcccttttctactgcaatttctgcctgacgcgcgtaatctgctggtgttcttgctgtttttcttccaataccccagccattttgcagctggcttgcataagctttcagggtatctctgtgttttccacctaaaagacggtacagcggctgtccatacacctttcctttaatatcccacaaggcaatatcaaaggcactgataccgccaaatacaataggacctccattgtaactccagaaacacccctgatacagtttctgccagattacttcatgatccaaaggattcattccaatcagccggtttgccatgtcttttaacatggcaaatgcagcctgtgaagcgcctccataagataatgccacttctccatctccataaattccctcgtctgtgtatatacggcataaagatggtctccagcccccttctaccggatcgcaatataaaagatcgatttttgtaattttcattcccagtctccttcatctatgtatttttattacagtaaacagcttattatatttgctaacagcagacacccggcggaacaaagtaccgttgaaataaaaatatatttataacattgtccggctgtatatccgcatgtatccatgatcgtgatctgcattccgttgtggggcagacagctgaatccggcagttgctaccgctcccaggcggtggatcagctccggctcaagcccagctgccagatattgtccggaaagcaggttcatggccacatccattccgcctccgccatttccagtcattgctcctgcgaaagatgcagcaatactaaaggaaagattaggcggtacaggcaaagctgatattgcttctaacacagtctccgctccattacatgcaagaactgcaccgccaaatccaacagatacagctgttgtaataacagcaggtcctactaattttgcgctttcattgataatacgcagtttatccggaatatttttccagccaataaaaagagccacaccagttcctgccagcactgcataagaaagatctaattgcgcaatattgatcagtaaaattatcattacaagaggcaggactgataatggtcccggaatcccggcatccatttcaaactttgtgatccgttctttaatagacggatttatttcaaaatgctcccctctttgccttgcttttttaaattcccaagaaaaatatacgaatataaatgccatagccgcagcagagcagagcagaccgatcccggcagctgcagccggtgttgtgcccaaatactgtacaggaataatattgtttaactgggctcctccaggaagcagcgaaagggcaaatgtacaggagctgctcataatgcaggctggaatatattttcccggaagatctgccttgcgaaatgttgcaagaaaaatgggatatacggtaaatacaataacaaatacactgacgcctccataagaaaggatcgcagttgctaacattgccccaaaaacagcatttttatctccaaaaagttttccgatcatttttgaaaatacagatgctaacagcgtttcttccattacttttccaaacaaagcatttgtaacaaacaccagaaaatattttcccacaaatccggcaagtgaaacgccgtaatgatttataaacagatccatataagaaaagccattggttaatgccagtaccgccacacagatcagtgttgccgggatcaagctcagtcttttatagatcaaaaaaatcagcagcagtaccgcgatcaatacacctgccagttccacctgtatcacctcctactaaccatgcttttttctttgtttcattatagaaaagacgtttattttctacaattttctatatattttataagttactaagaaatttataagcaccagtcaaatctgttttaatgcagtttccagctgataaagagcactatcaaggatcttccttgggcatgccagattaaaccgcagataaccttctccgcccggcccaaaccaggatcctttatctactccaatatgtgctttctggtcaataaatgattcaatttcttctgtactcatcccagttccgcgaaaatctacccataccatataagttgcctcagattttttcatgtgaagcataggcagtctttcctgaacatactgaaccatatgatccatattgtcatttacatagtcacacaatgtatccacataattaccgcttttatcataagctgcttccaaagcagcagaaccaaaccagttcatattaaaaatacggtttgcatttaatccttttacatacgtttcacgcagttcatcgtccggtataactgcataagcagtctgaaggccagccaggttaaaggttttgcttggggcataatggacaattgtattcttttttattttttctgaaagggtaccaacagatgtatgcgtgattcctttcatcataagatcagcatgaatttcatcagaaatcaacaaaacatcattttctgcacagagatttcccaagctcgttaattcttctgctgtccatgcacgtcctacaggattatgaggattagataagatcagaagtttattatccggatcttttacttttctttccagatcttcaaaatccatgaaccagtctccctctttttctatcagaggattataaaccagcttacgcccattattaacaacaccatctataaatggataataaaccggtgtctgtacgataatgccgtccccgggctttgtaaaattctggatcgtaatggtgtatcccggaatcacacctggagtaaaaatgatccattctttttttatcttccagtgataacggcgatctacccagttaatgatcctttcataaaaacagtctggttttgttgtataaccataacatccaagactggcgcggtctattactgcgtcgatcacttctttcggagacctaaaatccatatctgcgatccacattgggatcatcgctgtagattcatctacgccgaattttgaattgcagtcatcccatttcatactccgggtatttttacgatccagatcaaaatcaaaatattcctttgtgtaattcataattacatctctccttgaataccttattatatatatctgcggcgcctgcagttatagacttttattgacttatttccccgtcttgtttaaaattatagcaataggaaaagtccccgtcaaaaaagcaaaatattcctgtggataataacttcaacattttctttccgtgacacgattaatttcggacaataaaagctgaaaaactgcacatcatttgtgtccgcgatcctaaatcgttaaaaaatattattttagggaataaaaaaggaaaccatatgtcagaaataagcaaagaaatcggacagaatatccgccgtacacgtaaaatgcggaaaataacccaccaacagctggctcaggctattggcaaaagccagtccgctatatcaaaatatgaatcaggtgaaatagccgtggatatagacactctgtatgccattgccaacgcactgcaggtgcatattgaaacccttctgtattttcccaatactgccacatcctcttccactttaaaagaatgccccgcttttttcagaaatgttaaaaacttgtatggttatgtttacgatggaaggatcaaccggatcgggcgacgcctttttgaactccatccggaagaaaatggccttacgaaggtcatgatgtatatgaactttgaagattatgatcattaccagaactgtgaaaatacttataaaggctacatggaacattttgatgcagttacaaatatcactctgcaaaatcgagatgtggaaatggaaactgcctatatacaaatactggctcctacattaaatgcagaaactaaatgggctttatttacaggcctgtctacaagaccgatcatgcctattgcacgaaaacttctactctcaaaaaacagattatgtgaaaacaaagaattggaaaatcagctgaaagtatccaaagaagatattaaacagcttaagttgtaccatatgtatacggtgacctgatcactgtgtttgtaaaataaaaagacatattttcttttcccaaaataactttcgggaatgaaaatatgtctttttatttatattggtattatgtttaattcctattactgtgggcttacgatcttacctgcaatcgcacagcttgctgctgtctttggagaagccagataaatctgtacctttgaagttcccatacggcccaagaagttgcggttattggttgcaactactctttcaccatctgttaaaataccgcccgttcttccgcagcacagtccgcagcctggatgggtgatgatagcaccagcctctgccagtgtatccaggatacccatttcatctgcctgtctgtagatcttgcggctggcaggtgttacgatcagttttacgaaatttgctaccttcttgccttttaaaacttctgcagctgctgccaggtcctctaaacggccgttggtgcaggaaccgataaatacctggtcgatctctgttccttccagttcgcttacattgcggatcttgtctacctgggatggacatgccataaccggtacaaaatcttctgccttgtattccattaccttgcaataggtcgcatcttggtctcctacaagactcttctggtaatcatttaaaataatatcgcaatattctgctgttttttcatctggtgtaaacagagcacacttggcacctgcttcaatcgccatattggaaatggtcatacggctggcaacagtcatattctctactgcacttccggaaaattccagtgctttataagtagcaccgtctgctcccagatcaccgatgagacgtaagatcacatcctttgacataacattttcaggcagcttgccattgatcacaactttaatggtctccggcaccttgatccacatggttccggttcctaagatacttgccatttctgtatagccgataccggaagagaatgcgcctacacagccgtaggtagttgtatggctgtctgtaccaaatgcaatattacctggctttacataacctgcttctgtcatcagctggtggcagataccatcgcttctgtgtacatgggtcatgccgtatttttcagcaaaggcatcacctgtatgaaaatgtctggtatcatctaactggcttgcaggtaccaggtggtcgtagatcaggaccactttatccgggtcccaaagcttctcaaagcccatttccttgaatttttccgctacaaaagggataaatatatcatggatcatgacacggtccacatttacagtcacaatatctcccggctttacttctttgccggtattatgctctatgatcttttcaattactgtctttcccatttcttacacacctcacttctctttcttaatccagaccattcagtttgcgcatagcctttaccagacctcctgcgcggataatgctcatcaggttctctggaagagaggcgattgggtatgtttttccattgtaatccacatgttcgttcattacaacagagatggtatctccctctttgatgtcatcatagagagttggctgctcgatcagaagcagaccattgttgatggagttgcggaagaagatccttgcaaaggattttgcgatcacgcactgaactcccagtgccttaatgatctccggcgcctgctctctggaggagccacagccaaagttctttcctgcaacaataatatctcccggtttgatctgcgctgccagttccgggcgcagtggagaaaatccgtactgtttcatatcatctatggtttttaatgcaaggtactctgttgggataatgatatccgtatcaatatcatctcctaaaacccatacctttcctatcattttatccatttttctatatcctcatatctttgatttatttcgtaaactcacgaaccacgcattacatcacatcctcagccagagcgatctctcctgcaatggcagaagcggtaaccgtagctgcagaacctaaatataccttagagcttggatgtcctgcacggcccttgaagtttctggtgcctgtactgatcaggacttcattttcaccgatcacgccctgacagcttccccagcatacgctgcagttcggattcatgacaatagcgcctgcttccatgaagatatcgatcaggccttcctttaatgcctgacggtaaacggtctggcttgcagggactaccaggaaacgtaccttttctgccactttcttgcccttgataatagaagcacccactcttaaatcttcaatacgtccattgttgcaggagcctaagaacgcttcgtcgatcttaattccacgaacttcttctgcaggaactacattatccacaaaatccggttttgcagctacaggacgtaccttggataagtcaaaggtatattctcttgcatatactgcatctggatcactcttgtatacagcctttggctttctgccatgtgcttccagatattctaatgccttttcatccgcctcaaaaatacctgtttttgcacctgcctctactgccatattgcaaagtaccatacgctcactgatgcttaaggattttgcgccttctccggtaaactccattacctggtaattacatccgtttgcaccgatctcaccaatgattgttaaaatcaggtctcttgcataaacaccttccggcagttttcctactaagttaaattttacagtctcaggaaccaatacccaggattttccagttaccattccataaaggaaatccgtacatccaacgccggtaccaaaagcacctaaagcaccataggaacaggtatggctgtctgcaccgaagatcagttcgccggaacatacataattttccatcatcacctggtggcatacacctttgccttcccagaaatcaatgttattttcctttgcgaaatcacgcatcttcttctgggatgctgctgttttcgggcagtcagaaggtacgttgtggtctacgatgaataccactttttttgcatcagcaatatgtggattttttaatttattgcggtacatatctacagtcagatgtgtagtaccgtcattactcattaaacggtctaatgttactgtatggatatctcccggttttacgctttctacgccggctgctgccgctatgatcttttctgcaatcgtcattcccattttcctattcctcctcacggtttaatgaggcgatcagtccgccctggtttaaaatattctgcatgtattccggcagcttggtgcaggaataggtcttgccatttgcctgggcagttccatctgacatggaaagttccatggtatcgccggtctttacctcatccggcagctccttacagacaataacaggaaggccgatgttaatggcgtttctgtagaaaattcttgcaaaggactttgcaacgatagcctgtacacctaatgcttttaaaacacctggtgcctgctctctggaagaaccacagccaaagttttcgccgcctacaacgaaatctcccggttttacttttttagggaaatccgggtctaaagactcaaaagcatgctctttcatctcttctaagttcggtaaaagcagatactgtgatgcgatgatctgatctgtatcaaggtcattatgaaatttaaaaatggttccttttgccatgatatatgtattcctttcttaaagccgccctgcctgggttttgttttttctgtgttttgtactgatatgtagtataccataggatgggccgtaatggaaatggtggttattgatacatttaataactgtaagttatagaatgcgccccacagataacctgtatcatagaaaagagattgagatcaaaagtatttttccccgctgataccgaattgctgcgtgcttttctctctcacacttcttttactgtaatttcatgtacatccgagttataatgactttatatcgaatccttaaggaggtagacttacatgatatgcataaaaaacggaacgatccacacagcagttgatccgcagccattcacaggagatatccttataggcggcggaaagatcttaaagatcgccagtcacattgatgatgattatgaacagttgatcgaagctgccggacttaatatttatcctggttttgttgaggcacactgccatacaggtcttgatggctacggcaacggcgtaccaggacaagataccaacgaatggaatgacccagtagtgccacaactgcgggctattgacggcatcaatcctatggatccctgctttgaaatggctgccaaagccgggatcacctgctttgccacaggtccaggaagttctgatgccattggaggcactttcgcagctgtgaaacccatgggaaaacgtattgataatatgatccttaaataccctattgccatgaaatgtgcttttggtgaaaatccaaaacgacgctatatgaccagccgcatgtccacccgtatgaccaatgcagctttgatccgggaagcactgcagaaagctgcattatacatggtaaaaaaagaggccgccggtgatgacgtctccaagctgcctgcttttgatcaaaaatcagaatccctgattcctgttttaaaaggggaacttcctttaaaagcccatgcacatcaggcaaatgatattttcactgccatccgcattgcaaaggaatttcacgccaaactgactctggaacatgtaacagaaggccacctgatcgtagatgaactggtgaaagaaaaccttcctctggctgtaggacctactttcagccatgccaccaaagtagaactgctaaataaaagctggaccactccaggcatcctggcaaaagctggctgccatgtttccattatttccgatgcacctgttaccccgctgcatgatctgcccctttacgcaggcatggctatgaaagctggtatggatccgtatgatgccctgcgcgccatcaccatcaacgccgccgaacacatcggtgttgctgaccgggtaggttccctggaaaccggaaaagacgccgaccttgtgatctgcaaaggctctcctatggaaatttcaggagtggtgaagtatgtgtttattaatggggaattggtggaataacattatataccaaaaactgctgtatacagttttatcactcccgtatacagcagtttttattttcttcttattctgtttttaaaaatacttcttgcttccccaaagattacttcttttaaggtccagatattcattataagccttttcaaggatctgcttttcattggaaaacttcagcagatgatatgcttcgtaaaatttgtaatacccggaatccagaaagtattcttcccgctgtggtttactgtagtagctgtcagccatcatcagataccagtgtacatctttttctaccacatcctggggcgtattaaaggtgtactggctctttccaatgtacttgatgatagaagcgcttactccggtctcttcttttacttccctaagagccgtttctttgtattcttcgccagcttctactgttcccttaggcaggacccagccctcatatttgttcttgtaattcttatacaggaccaggatcttccctcgaaatataaccacaccgccgcagctcgttgcctcaatcattgcaattcctcccggttttggtgtgaatctgaataactggttttagtatacaacgtttgagggttatatgcaagaaggaaatctgagtcgctagatgcttataatggttttattattggatgtgataatgctttttcattccttctaaaaactctggttctgatgacagacgggtgatatcgctggtgcggccatctagttgcatggcggtgattaattttaagatggtcagttcaccggcagattttccctctattttgctctcttccacccaatcaagaagtcctttgcacatattgattcctccttcttcactacgatacttatctttgaccatctgcagctgtttggtgtctgtcatggctgcgatcaggtcgtaggcatcttcatctatgtttgtaaactgctcttctctttctttcagatattgttttactgcttctttgtctaatgaacggcggataaatccaaatacctctctcacatctgtttgaaaacattcctcgtttgtaaatctgcggacatctaaaacatggatcggatagtggttgataaatgtttttatctcttccggaagatctttgtgggctaaaatatcataaatatctttgctgttgttccacggctcttcaccataatagatcacaatggttacaactggtgttaaaacgtctgtgtctgtcagactgctgatataatcttttttgtttaaaacacctttctcccggttttgtttctgcagctttttcatctgccggtcataagacaaagcatcttctaccatcactcgcaccggcattcccctgtggatcttatcctggtgttccagggcaatgatcgtaaatgatgtaccaaacgcaactctctttactccatcacggaaacgctgtatctttttccttttttgtacaccccaactgtctttttgtgattttcctgtttctcttgtatcctggctataaagctgtttttccattataacctgctttccatcaaagatatatccatttaacagatccgcataccgcctgtcgtcatcgaaaaatatcgctgtttctatgtcctttgtccccatttattctcccctttcttgctgttgcaaggcaaaagggcagtttctaatatttattatacaaaatccagttataaatttcaatatcccccacccacgtgcctgtttttaaacagaatttcctgagaccatttccacttcttttaaatttttgcttttgatccatgatttttagctgaagctgcctgaatacagatatgcaacgcattaaacattacatagttttgaaatattattctttatgattaagaaatgtaaccatagtatatcatagcgggatccaaaaatccaccacaattttccccctgcataaaaatagcctcacagaccgcatttatgcatctttgtgcactcatgcgttatctgcaaggctggttttattattgctctcacgagccgtccactcaggtccccgcactaacgtgctctactgcctgcttacgcaggctggaccttcgttaatggctttggaaaaacaaatgccgccttcggcgtcgcttgttcttccctgcgctcatcggccacccatgatcccaataaagatcttctcatctgtaataggcagttccctgatccttacgcctactgcattatacactgcatttgcaatagccggagatggggtgttgataacgatctcaccgatggattttgcgccaaatgggccggttggctcgtagctgcattcaaattctacctggacttttccaatatccagacggcttggtactttgtactgcatgaaggaattttcatggacacggccatggtcggaataggttacatcctcgtacattgccataccgattccctgtgccaggccaccttctgtctgtactcttgccaggttctcgtttaatggggttccacagtctacagctgctgcaaactgaagcagctcaatatgaccggtttccttgtcgatctccacttctgcggcgcctgccataaatggtggcggagaaacaggtgaagaatgggattctgtagcctggagggcttcttcattaaagcacatggctctgtttccaatgtcctttaatgtgatctctgccggttcgccttcaggggcatttaatctgcgcactgtctttcctgcaaactccagttcatcctcagagcaattcagatattctgccgccttctttaatatcttctttttcagtgactcacaggtctttactactgccatacctgttaaatatgcagtactggaagcataggaaccggagtcatatggggaaatatccgtatcaacaccgtaaactacgatatcatccagctcacagtccagacactctgctgctacctgggccagtgtggtatcacagccggtacccatatcagctgcaccaatggtcatgctgtaaaagccgtcatcatttaccttaatggtaacgcttcccacgtctacgccggaaattgcggagccctgcatagccattgcaagaccaactgctcttacctttccatttcccatatcttttctcggatatttttcatcccagccgatcatctccataaccttgtccacgcagcggtcaagggcgcagctattggcagtctcgccgtagtaagcaggcatcacctgtccctggcggaccatatttttctttctaagctcgatcgggttcattcccatctgggctgccagctcatccatagcagactctacagcaaaaataccctgcgttgcgccatatccacggtaagcgcctgcagacatgcggttggtataaacgacatcataagcaaagcggaatgcttttggtgtgccgtacataggaatggacttatggccggaaagacctacagtggtcggtccgtgttcaccaaatgcacctgtattggacaatgtatacacatccattgcctgtaaaataccattgtcatcgcagccgatctttacctttacttccatttcgtgacgtggagaagaggcgatctgggactcataacggctgtaaatgatcttagccggttttcccgtcttcatggtaacgatagccggataaacctctgctacaacagtctgctttgcgccaaaaccgccaccgattcttggcttgatcacgcggatctttgactttggcacatccaatgcatgagccagaatacggcgcacatggaatgtaacctgggtggagtctactacatttaaacgtccgtatacatccatataagtaaaggcacggaaagtctccatcatagcctgctggttcgccttggtgtggtatgttttttccacaatgtggctgcagcctgcaaatgccgcctccagatccccatgagtctctccgccactggcacataagtttctcttattatcagcgcctacattacacagggctttccagctgtcctccggatgtaccaggatcttaccgtccttggagtcatgcatatctaaaacaggctctaacacctgatatttcactttaataagacgcattgcatggtctactgcagcttctgtctcacctgcaatgatcgccactgcatcacctacaaagcggactctctggtccaggatcagacggtcataaggacttggctcaggatacgtctgtccggccatggtaaaacgcttctgcggaacatctttccatgtaaggatacattcgatccctggtactctggaagctaccttgcagtcgatctcttcgatcagtgcatgggcatgtgggcttctaagcacttttacgatcaggcagtcctttaatgccaggtcatcagtgtagaccggcttacctgttaccagtgcctttgcgtctttctttacaacaggagcgccgatcagacggaatttctttcctgtagcaggattgatctgtgtatatgccatttccttatgcctcctttccgctctgcttcatatccagatatttttttacagcacgcagctgggacatatatccgctgcagcggcataaatttccggaaagatattctttaatatcttcctcatctggatcttttaactctttttccatagcaagaacgttcataataaagcctggattgcagaaaccacactgctctccgccttctcttgctaaaaacataccaaattcttctgcctctttctgcagaccttccagtgtagtcacatggcggccatctgcccggatcgcaagtgtagaacatgacagaaccggctttccgtccagccatacagtacaaaggccgcagtttgctgtctcacagcctctttttacgctgtagcaacccagatcacgtaccagatccaataacagcatatccggtcttacatctgtctctacctgttttccatttaagcgaaatgaaagtctcatactatgcccacgctccttcctttgatctgctccataagacggcgggtgtaaacagttgccagagtctttctgtaagcaccgctggcgcgtgtattatcgccataagtaaatgcttctgccgcttcctttgccatctcttttaaggtatcaaaatcatcctccgtaatgatcactgcctttgcttttgcaggtcttgccccaacggacacaaaccatttgtttccaaggttggaaacacaacaggcgatcaccggaaaatcggtacgggaattgcgctgactggtataagcagcctttcttccgtctttctttataataatacgaaccaggatatccttctgatcccttcttacaggtctggctgcaaattcagaaagaagaatggttccctcatgatacagctccacataagcatccagtgccaacaggcaggtcagtatatcggaaaatccgaaacgggcaaaaatactgcctcctaccgtagcgcagtttctcatctgcacgccaacgatatttctggtacattccctgaaaataccatcaaaataccggttcagcccctcatgggtctctaactggcgtaaactgcacatacagccaatagaaaactctccttctttttcttcgattgcatccagtccaagcccggacaaatctacaatagtacgcttggtaatatgagtcattttcatccataccattccgcctactaccagactgcttcgcttctgacaaagctcatatgcctctgccagatcgcttaccttaacataatcatctgctcggaacacctgtttttcccccttcgtatgtttgtgctaataaatattgataagtttttctaataaatagttcgtcttttagtagaattcaaaacaaaacaggcagattataacacgaaatctgcctgttttccatagaaaacgttattctttttaaagattatctccccatatatatatcaaacaactgtcttgcaataggtcctgcgatttttccaccgcttccggactcttctaccaggaccgtaacaacgatctttggtgactcagccggagcaaaaccggtaaaccatgcatgtgtctcttttcctgtttcaaactccgcagttcccgtttttgcagccactgtataggcatcggtgcgcacagaagaacccgttccttccaccactacatcacgcatcagttctgtaagatttgctgcctctgtagctgtcataagagttccccctgaagtcggaaggaattttttcacttcttccccaccggcactgactacacggtccagcaaatatggtttcatcagggttccaccatttgcaacagccgcagtgatcagcgcattgtgaagaggcgtgatcagtgtagttccctggccaatggaagtctgtaaaacttcccaggttccggcgcctcctttcatattaaaagaactttccttataggagtagccggataatggcaacggattattaaatagcaattcctccgccgtagcatggaaccggtccagatccatggtcagacccaggctggaaaatgccccgttacaggaattggcaaaagccttcataaaatcttggcttccatgggcttcactatggaaacatttaatggaatagtctccattgtgataaacgccattacagtcaaaatgaaaatccttgtaatcgtcaggatgctccctcatatactcaagagccgtcacgatcttaaaggtcgatccaggaggatatagtccggcagttgcacggtttaccagctgcccctggttattggaactgtcagtaagagacgcccagtcctgaagaagggtatttggatcgtaacccggcttggaaaccattgccaggatctttcctgtatccggttccatggcgatcaccgctcctctcctgtctcctaaagctgcatacgctgcctgctgcagttccatatccagagtggtaaccacgctgtctcccagatttttcgcacctgccagctcatttcccgcctgctctaccagattgacatgagaacttaaaagatagaagtttgccatagcttcaatgccagtttttcctttagaggaatagcctaccgcatggtcaaacacacctccataattgtaaacccttgtttcatttcccgcatcatcagtggtagtctctgccagcaccgttccatctgatgccaggatactgcctcttacaatgcggtctgaaaagctgtccagtctggcattgtaaggattgttgatcacatcttcgcttttcatctgcagaaaatatcccatgtatacagccagtgctaaaaacaggaccacacatgcataagtgatcaccagcactttcccattgggatcatatacccgctcttttgtcactgacttccaggtacctttttctgtatcttttttgttttctttctttatctctttacctgtatttttttttgtactcttctttgctgtctgttccttcttttcagccgtatttttctttctggagacaggttctcttcgcgtactttttttcagttctttcattcttcctgcgcctccatttcttccatctcttcttcatcattccgcttgatgatataaagcccctggataatactgaataacaggaatgttgtcacaatggaacttcctccgtaacttacaaacggaagtgtcacacctgtagatgggataaatttagtcacacctcccactgtgagaaagacctgtaccacatattccattccaagacccactgcaatgatcttgtaaaacatggcctgcatctgggttgcgatcatcataaactggataaaacagcccagacagatcagaaggacgcagatagcaaagattgctcccatttcttcggagatagcagcaaaaataaaatccttttccactaccgggatcctgtttggcattccctggcacagtcccatgccaaaccagccacctgttccaatagcaaacagggactgggtgatctgatatcctgtattatcaatatctgcccatggatttttccatgctgtaaatcttcgtcttacatggtcaaaaagtgtatatgcaatagatgtagcaccttttccaagaacacctgccgcgatcagatacagccagtttcctgtagcaataaacagcatgatcacatagctgataaaaaagatcagggcgcttcccaggtcttttgacaacaccaggatcactacatgaagagctgccaccactgtggtaatgcatatgttcttaaaatccagtgactgataaaacatggacgctacaaaaaatacaaaactgatctttacaaactctgatggctggatggagattccgccaacagtcagtgataactgagcgccgaaactttcatttcctgctacccatacaactaaaagcgcagccagcccgatccctgcatacacccactggaatttataaagctgccagaaccgttccatgataaaaggcaccagccaggaaaggatcgcagccgctgctacgatcacaaactgcttaaaagccttatccagtcccttatctaaagacagtctggtaagcatgataaaaccacaggccaggagcatacaacagttatttaccagaagtcttgacacattcctgtaaataaaccggtagatataaatgtaaaacaggaaaaacaccacctgtcccatataaaataccagcagcatccgccttaacgtttcatcttctgttttcagatacatcaccacatatgccagaaaatgcagtaaaaacatggcccggttctgccttgcacacacttttctcttccgttccagatccgggaaagaaaagaaacggaaattggcataggtataaatggccatcagcaatatcatcagatatttggatacttccacgatcagatttgtcataggctattctactccccgtctgaaatgtcctcttgtaaaatctttcactggttcgacaatttctcttccttctataaaagaagcagcaaaagcttccagtatcttttgtgtttcttcttttccttctcttgtaaaagaaagacgcagggaagccatgttcagctctcttactgcctcttcattgccaaataaagataacggaagaggatttaaaatggtattgtagcagaagttgcaatgtgcctttaatggaagcccggcaccggtgcggtccttcattataaggtgttcccttttggctgtacatccctttaatgtttttaccacacactgggcagaaaccatcataggagcatgcccataaatgaccagttctcccggtattccgtccctctcacaggcttttgccactgcctttaactctctgctgtttaattcccacggcatggtaataaattccggtcccatttcctttaatgtgtgcactgcttcccggttccatgcataaacagaggcatccagagcaaatggaagctctattttttcttcctttaaccaggaaacttcctccaaagtacgggccagaacaccggtaaaacctgcattttccagatttttcctgtttttagagaagaacttcatggcatgggtgcggaaaatatgtggaagtgtaaggaagcattcctttccctttgcttcacactgctttacgatctttccccactgatccggtttaaatccatctgcatcgatataaatgcgttttacagcatcacaggaaagagctggttccaactgacattcttcttccagagatgcagtaaggaaagcaaagctgtgaatgtttttggaagcagactgtacatcagcaggaagttcctgttctgtctgcaccagagactctgcctttctctcccactgagccagtattttttccgtcagcttctcaaagccttctcttcgcagttcatttaatgcctgtaccggcaggaaaatatttccctttaactcaatatccagctgctcaaagtaaaaggaagtggcacctgtcttatttaactgcttacgcactttttcctctgttgcaggctggttctgggcactctggcagatctgtccttccacttttacagttacatttccctgtgtcagttccaggacagccggttttccttcctcaaaaacagcctttccaacaaccggttcctttttctctttttccacatagtttgcatccagaaaatcaaacagtttctgatttccttcacgaaattccggcttttcttttaaagcgaccatgtcttttccattgtgcttctcataataaccggaggtaaaacctcccctgtcaaacagatccagcagttcttttttatcttccggatccacataataaccgtctttcccataggtttcatacagatccagatattttctgtaaatgcggactacacctgctgtatatcgcgggctcttcattcttccttcgatctttaaagaatatactcctgcctctaagatctccggtaaaatatccagcgtacacagatcttttaaacttaatacaaacttctggttctctttgtttaagctctttccctctgccttgtctccctcccatacacggtaaggcaggcggcatggctgggcacagcggcctctgttgccactgcggccgccgatcaggctgctcatgagacactgaccggaataacagtaacataaagcaccatggacaaaggtttcaatatccattcccgtttctttgtaaatacgggaaatctcttctaaagacagttctctggccggaacgacgcggcagcagcccatttcttttaacatttttgcgctgtatacactggtaaccgtcatctgggtgcttgcatgaagctccattaccggaaaagcccgtttcattacctgaagggctcccagatcctggacgatcacgccgtctaaccctgcttcatagtaaggcttcatgtaatcacaaagctcgtccagttctttttccttaaataatgtattgaccgtcatgtacagacggcagccgtgaagatgggcataccggatggcttccaccatttcttctcctgctgcattctgtgcataagctctggcaccaaaacggctgcctcccatatagatcgcatccgctcctgctgccacagctgcctttaaactgtcaaaagaacctgccggcgccaaaagctctgcttttcttgtatttatcatgatcttacctttcctgatcctatgcaaaaaaggggccactgcaaactgtagcgcgccccctttagtctatctgtgttttatctgcgtccgtttctgtgggaaccggcttttctggctgcctgaagagcctttcttgcaagttcctgatcagaaagtcctgtctttgtctggaaagaaggattttgcattggcatatccgcctgtacaaaaccgctttctgttgcctgtgcagctgcagtctcatctaaagctggtacagactcactgaccggttcatctccttcgatcacagtgtctaccacttcatcctcaactacttcctcttccccattttcagatgttgctgccagtgctgcctgcttctttgcagctcttaattcccgttcggattttgaaagctttgcagataattcctgaagctgacgctggcgttcctccaagtcctttaaaacgccgtctaacttcatctgggtgcttactagctcatgttttaagctgtaagtctctttttccattctgtctctctgctcttccatctgatccgcagtttcttttgtcttaaaataatcatctgcaatgttcagtaaaagcataagctgctggtaatcagcactctgtttactgaaaccaggaagcgcgtgcatggtggttatcttttcatttacatagctggctgccttctgaagatatgcttcatcttcgcttccgcctaacgtatatatttttccatcaatcaaaacctgtgtataattctttgtatccattctgatcttccatctcctgtctgtgaggcattttcgttaaaaggataccacatttttacttcatttccaagcccaaatgacgatatgcgttttctgtagccattcttcccctgggtgttctgttaatcagaccgttcattaaaagatatggctcatatacatcttccaaagttcccgcatcttctcccaaagctgctgccagggtatcaagtcctaccggaccgccggaaaacttttcaatgatcatcaaaaggatatttctgtcattctgatccagtcccattttatccacatccatgatatccagagcaaaatctgccacttcttttgtgatcacaccatcatatttaacctgggcgaaatctcttactctctttaaaaggcggtttgccagtcgcggggttcccctggaacgttttgccagttcaatggcaccttccggttctatttccacacctaagatcgtagcagaatgctggatgatcgtgcgcagctcctccggcgtataaaattccattctctggaccactccaaaacggtctcttaaaggagcggacaacagtcctgccctggtagtcgctcctactaaggtaaagtgaggcagttccagacggatggatctggcactggactcttttcccagcataatatcaatggcaaaatcttccatcgccggatagagaacttcttctacctgacggtttaaacggtggatctcatctacgaagagaacatccccctcctgaagattatttaaaatagcagccatctctcccggcttttcaatggccggcccgctggtcactttcagcctgcttcccatctcgttggcaatgataccggaaagggtggtctttccaagtcctggggggccgtaaaataatacatgatctaaggcttcccctctgctttttgccgcttctatgtatattttcagggtggatttgatcttttcctggcccacgtaatcactgaggcactggggacgcagggtggtttctatccgcacatcctcttctgttgcctctgttgttataattctccgttccatatatacctcaaattaatcacagaaaacttaaatacttcagcgaagcctttaaaatgtcttctacactcatattttctgtgatctccactttctttactgctttggaagcttccatattcgtatacccaagagctgttaaagctgccactgcctcttttgcagctgctgccatacctgccacagatgcgcctgtaccagcaccggaagtatcttcctttccgcctccaaaggaagccatcatcacttcctctaaatctactttatccttaagatctaagatcagtctctgggccgtctttgcgccgatgcccggtgccttggaaatagcttttgcatccccgctgacaatggcgatccgcagatcatccggccgcataatagaaaggataccaagagctcctttgggaccaattccattgaccccgatcagctgcttgaacatttccctgtcctgtctgtgaagaaaaccatataaagtcatagcatcttcccgcacctggaaatacgtataaacggtcacttcttcccctaatgccggaagttcctctaaaagtgaaaggggtacatggactgccagtccgatgcctccagtctccactacgatcacatcatcttctactgccccaagggctccttttatatatgaaatcatctgttctatattccttttatctggtttcgcacctacatgcgatacttcgtcatctatcaatcataacatacacaccgcctcaatgcaagcaggacaccgaacaaatattcgatactctttccttgcattttacttaaaaatcagctaaactaagggcggtttgcgttctggtctttcaggatcagatatgccgggcagaccagaaaggatttttatgatcaccattaaacatcccattgaatttccaaacacatatcctttagaccgcattggtcctttaaaggatcttttattttttgatatagagaccaccggcttttccggtgaaacttcccagctgtatctcattggctgtacttattttgacggatttggctggaagctgatccagtggtttgcagatacaagacaggcggaaaaagagcttttagatgccttttttgaatttttaaaacgttttaagatcctgatccattttaacggagaccgttttgatatcccctatcttttaaaatgctgcgaacgtctgggccttgactaccattttgatgaccttataagcattgatattttcaagaaaataaagccctacagaaaacttttaaaactggaaaacatgaaacagaaatccattgaacagtttttaggggtacatagagaggacaaatacaatggcgggcagctgatcgatgtgtaccgtgaatacctgcacacccatgagaaattcctctttgacctgctgatactgcacaatgcagatgacctgcggggaatgccttccatcctgcccattttaaattatgcagatctgtttgagtcggattttaccctttgcagtcataagttgtattcctacacggacgaagccggatattcccatccatttgtcaatcttttgtgggaaagtccttacagcgtccccattcctttagaatataccttaaatcctttaagcctggagcttcatgacaactgcctggcctgcaatttaactctgtatgaaggcactttaaaatatttctacccggattaccagaattattattacctgcctttagaagatacagcgatccataaaagcattggagaatatgtggaccgttctgcccggaaaaaagccactgcaaaaaactgctacagcaaaaaagagggcttattcctgcctcagttcggttctttgtgggaaccttcttttaaggaagaatacaagtcctctctcacttacacgctttatgatgataaaaccctgtggaatgataccgtgaaaaattctcactatgcccatgagatctttaactatctgaccgggcagctgtagctgccgcatacacagcatacatctgggaagcgccggtatccccatgtcctaacatagcctggactgcatggatatccgcgccatccccgatcaggtgggctgcaaaagaatggcgcagagtatgaggcgtaatatcctctttgatccccgttttttccccataatatttgatcagcttccaaaagccctgacggctcataggctggccactgcaattggtaaacagccactcacaggcacgcccctttaaaagagaacttcttgccttgtccaggtaagtacgcagcgcctgtttcgccccttttccaaaggggatcatccggtctttactgccatcatgacaggtgatataaccgatctgcatgttcacatcctctaatttcagactgatcagttctgatacccggatccctgttgcatatagtaattccagcatggccttatcccgcagttctttcgctgttgtatttcccggctgtgccaaaagggcatgtatttcctctatggtcagtatcaccggtattttgcgttcaattttgggaacacgcagaaattccgccggatccctgtttatctttctttccttaacaagatagctgaaaaatgccttgatggacgccagttccctggaaatggtagctgccgcttttccttctttttccagatacaggatataagaattcaaactggtcttcgtcaccttctccacctgtgtgatccccatttcttccataaatcctgccatctggagcagatcccggtggtaggatacttctgtattttttgccgtgtgcttcacttcctgaagatatgcggtgaagctgtttatctctgatatcattttgttcccccggtacacagtgcagtttttactctatttttacagtataatttatttttttatacttttaaatagttttcgttcactcatcgtttcaaaatgaaaaaaggtatgcctcaaaggctgctccacaggccgtaaggagcattaaaaaagccaatgctggcaatcgcagcctttttcttgtactaaaagaccatctggaaagaacgtaccagaccatgagataaaatatcccctgaggaagaagggaacgcaaaaacagaggcagtccccagagtcccttttccaatgtaaaataaataactcccattcccaggctgaaagaccagaaacaggtcagtatcccaaacagccatacactgtaaaccgtaagcccgcagagccaccctgcacccagctggaaaaaacgctgttttatgacgatcagaaacgcttctgtaaagtttttgtttcctgttattccataactgtaaaataaataagaaggaaatacaggataacgccaccagaaaaataacgctgcccctatcattcccagaaaaaaactaaacaacagcagataactgtctgccaagaatttgaagcgaaatcggaacatggactgcctttcctgctttttcaagcgcctttcctgtgctcttataccagttgtatgccctttgcagcctgtgcatgattatttttgtacacggttagggaaatatgatataatcattaacgaacgaaccgcctgcaatagcaggcagataagcacgccagtgcggggttcgtgagcttacccttggaggattttaccatgagtcaatatcagttgatcgcctttgatatggatggaactcttttaaattcaaataaacagatctcccctgaaactttaaacgccattaaacgggcaaccgatgcaggaaaaactgttatcctgtgtaccggccgcaacctggctgaactgaatgcgtttacagagatcataccgggactgcgctatttagactgtgtcagcggtgcctgtgtttatgacctaaaagaaaagaaaacactgtatttccaggctcttgaccctgggatcgtaaaaaagctgatggaatttggcatggaagaaggagccatgatccatgtactttcagagcgttccattgtccagaaggatcagcagtcccatatggctgattttcatatgggcatttaccagaccatgtttgatcagatcactgacaaactggaaaatatttacaattctttctgtgaagagccatttcctgtgctgaagctgaacctttaccacagagacgaagcctcacgggcgcgcaccgtggaacgcattaaagtagccggtcttgaaactgcactggctctggcagagtctacctctttagagtgttctgccaaagggatcgacaaaggtgtaggacttaaaaagctgtgtgaacatctgggactgccattagaacagactattgctgtaggtgatgcagataacgataccatggcattaaaaactgccggtctggccgttgccatgggaaatgcaaccgaacccatcaaagccctggctgatgtgatcgtagctgactgcgaccataacggatgcgcagaagccattgataagtatctgctggcagattaaacataacagcctgcgcctctggcgcattgtttgcatgaacatttatacaatatggaggatttaaatactattatgaaaatcagaactgcaacattaaatgacttagacgcattaactgctgtagaagcagagtgtttcccggctgctgaagcagccacaaaaaaggactttgaaaaccgcctggcttattatgcagaccatttctggctgatgtttgatgaaaatgacaaactgatcgcctttgtagacggtatggtcacagatgaagccgacctgacagatgaaatgtatgaaaaaggagaaatgcataatgaaaatggtgcatggcagatgatcttcggggtcaataccattccttcctgccgcaaaaaaggctatgcaggtgaactgatcaaagctgctattgaagacgccagaaaacaggggcgcaaaggcctggtacttacctgcaaggacaaactgatccattactatgcaaaattcggtttcgtaaacgaaggcgtttcccagtctgtccacggaaatgtggtatggtatcagatgagactgactttttaaataaatgatatgataccagggtcaaaaggtctaaaatccgacacaagcttgcttgcaggaggatttttgaacttgggacccgcaaaaaacatgagtaagtagccattttttgaagaaaaatgagcgaattacgaatgtttttagaattgcgagagtgcaaagcacgtagcaattcggtatcagagggggcaaaataccttttgaccccaacatcatgatatatatttaataacaggaggttttctgcctatgtgtgtatacaatgataccggtaaaaatacaacctctgcctctgaaactcttttgaataaaaggatcgctatagtaggcatcggcggcgtaggcggctacttaggtgccatgctggctcatacctatccccatgttacactggcagccagaggaaaacggctggaacatataaaagaacatggacttactcttcacagtgtttacagcgaagagatcacagcctttcctgaacatgtaacaacagccgatgccattggtccccaggattatatttttgtatgcgtaaaaaactattccttagaggatgtctgccgccagatcgcgccttttgtggatgatcacaccgttctcataccggtaatgaatggcgtagatacaggagagcggatgagaaatcttctgaaaaaaggcactgttatcgactcccttatttatatcgttgcctacgcatccccggacttttccattacccagatcggcaacctggcttccctgcggatcggcataaaaaatgcctcaaaggagcagtcagagaacgtccttgaggcatccgcccttttaagcggggcacatatccatcataaaattgccgataacattatcgcagccatctggcgcaaatacattttaaactgcgcctataatatcactaccgcccggtataaccggaccattggacagcttcgggaagatcctgagacagccgcccagtatgagaccttagtccgtgagtcctggcttgtatctgaggcagccggtgcaggcgtgccggaaacttccattaacgagatcatcgatcagttctaccataaactggatccggcatccaccagttcccttcaaagagatatctgggccggacgccccagtgagctggagaccttcagcggctatctggtacgaaaagcaaaggaactttccgtaccggtgctattgtcagaaactatgtattctgacctgcagaaaattgtttcaaaacaaagctgacatacgcctgacaacggcattatcacagatatttaagccagttcatctttcttgtctatagagcggtacttgcggccataagccatcagtgccgctattgttttgccgtcagtgatctttcctgtgtagatcatctcttccagatcttttaattcccatgcttccacttcgatcacttcatcttcatccagatgctgatgggacgggatcaggttgtgggctacgaaaatatcaatggcttcatcacaaaatgcaactgtagtatttatactcatgagatattccagtttttcagtgcggaaaccagtttcctcctccagttctctgtaagcacactcgatctttggctcatccggtgcgtccagctttcctgccgggatctccagtgtatagcggtttaaagcattgcggtactggcgcaccattaagatctttccttctgaagttacaggcagaacagccgctgcaccatcgtggtggatgtaatcccagtgtgcctcatggccatttgcaagaactgtatcctcatatattttcaggatatttccctgatattttaactgacggtctaaacgtactaccggcattccttcattttctacttttcccatgtttcttctccttttatatgttatgtactcccgaactcttcttgcaaaatcagacataaaaaattccaggagcattgatctttcacacctccgcctgcagtgcaggcgatgtgccacatacatttacattttcctgcccttttcatagctggcatcttctgccttgatcacagcatttctgaagccccactcttccagtgcagatacaccggcaatggtggttccgccaggtgagcaaacctcatcctttaactgtcccggatgctttcctgtttccagtaccattttagcacttccaagaacggtctgggctgccatctggtatgccttggcccttggaaggccgtattttacagctccgtctgccagcgcttcaataaacatgtatacataagccggtgaacagccgctgacacagccaactgcatccatcatacgttcatctactacttccagacgtccgcaggcctcaaaaataccacgaagcactgccttttcctcttcactgtagttggactcctcatatgccataccggtcatgccttcacccagtaacgccggtgtatttggcatggtacggactacgcgcacctttccgcccagacgttctgtaaggcttgcaatggtctggccaggtgccagtgagatcacgatctgatcttcctttaataccggacggatttcctcaaacactgtctcaaaatactgtggctttactgccaggatcacatactcagactgctttgcacactctgcattggatgctgcatgaaccactcctgtctttgctgttacagcttccatcttttctttgtgggctgctgtaaataataagtcctccggcttatagacccgtaaaagtccgtttaaaatagcggaacccatatttcccattccaataaaaccgatctttgccatatttttcgcctcctgttataatttttaaaacattcacgaatattcgtccattttaacgcacacacccgcccgcatacgcggacgggcaaacgttctttctatatgcgatttttatttatcatacccatccatgataccacaaaaatcaaaggttgcaaagtaatcctttggagtttctgcgcggcggatcatctggacagagccgtcttcctttaataaaagttctgcggattttaatttaccgttgtagttataacccattgcaaagccatgggcacctgcatcatggatcactaaaaagtcacccattttgatctcaggaagcatacggtcaatcgcaaatttatcattgttctcgcaaagggaaccggtaatatcgtacttgtggtcacaaggcgcatcttcttttccaagaacggtaatgtgatgataagcaccatacatagccggacgcatcaggtttactgcgcaggcatctacaccgatgtactctttatgagtatgtttttcatggattgctttggtaaccaggcatccataaggccctaacataaaacggccaagctctgtgcaaagagccacgtcatccattcctgcaggaaccagaacttcctcataaactttgcgcacgccttcgccaatagccataatgtcatttggttcctgatctggacgataagggataccaataccaccggacaggttgatgaaactgatatgtgcacctgtctcttcttttaacttaacagccagctcaaagaggatctttgcaagcatcggataatattcattggtaactgtattgcttgccaggaaagcatggataccgaaattctttgcccccttggactttaaaatcttaaatgcctcaaagatctgctcagtagtcataccatactttgcatctcccgggttgtccataatgtcattgctgatcttaaacacaccgcctggattgaaacggcagctgatggtctccggaatgaagcctaatgtatcttccaggcactggatatgggtaatatcatccaggttgatgatggcacccatttcatttgcgtaagcaaattcctcaggcggagtatcattggaagaaaacattacattggaaccggaaaaaccgcaggcctttgacatcattaactctgttaaagaagagcagtctgtaccacagccatattcctgtaagatctttaagataaatggatttggggttgcttttactgcaaaatattctttatatcctttattccaggaaaatgcctgtttcagatgttttacattttcgcggatacctttttcatcatacagataaaatggggttggataggtcttggcgatctcttctgcctgcgccagtgtaacaaatggtttcttttccataatcttatctcctttccctgtgggggatctttgctttacgcaatggtatttttatgcattatctatgcatatatatcagttccttttaattttacaggataacctccgtaaaagaaaagaagcctgtaagggagtaccatttcctttgcggataattgtactcccagacagacttctttgtctagtattatttttaatgaatgttttgaagattgcgaagcaatctggtagcattcagctagtccacacttaccacacgcatgatattggtagctgttgctgcctcatggcgtcttgcataggtaacgatacctgcggtaataacggccagatcaccagaattgatcacattgccgctctttaactcttctaaagagttttcgatcagctcatccgtactctctgcacgacgggaccatacaggtgttacaccccactgaagcatcatctgacggacagtagtagtgcttggggacataccgatgatacgtgctgccggtctccacttggaaagcatcatggatgtaaatcctgtaatacttggagcaatgatgtaatcagcaccgatgtcatgtgcggtagaaacagaagcggagcaaactgcattggagatattcttcatattctcctcagttactttacgacggcggtatgcgctgtagtctaagtaagcttccgtctcttcaacgatagataccatcatctttaatgcgtcaatcggatatttacccatagcagtctcaccggaaagcattactgcgtcagtaccgtcataaacagcgttggcaacgtcagtaacctcagctctggtaggtcttgggttgcggatcatggagtctaacatctgggttgcagtgataacagtcttacaagcctcattacacttacggatgatctctttctggatatgaggaacttcctgagccggaatctcaacacccatgtcacctcttgctaccatgataccgtctgctactgcaatgatctcatccaggttttcaataccttctgcattctcgatcttagcgattaccttgattgcagaaccttctgcatccagcatttccttgatctcacggatacagtcagctgtacgtacaaaagaagctgcgataaaatcaaagccctgtttgataccaaaacggatatcttctttatctttttcagtcagtgccggaagtttgatctttacgttaggaacatttacacccttcttctcgcctaactcaccgccgttgataacggtacaaacgatctcagtgccgtctacctttactacttccagctcgatcaggccgtcatcgatgaggatcttatttccagctgcaacatcttcattcaggccagagtagttgatatgggtaatagtctcatcaccaacgatctctctggtagttaaagtaaaggtctgtccttcctttaaggaaactttctttccgtcttttaatacgccggtacggatctccggtccctttgtatcaagaagagctgctaccggacggtccagttcttttctaacctcttttaaaatctccaggcggctctgatgctctgcataatcaccgtgggagaagttaaaacgagctacgtccattccatttttagccagttccagcataatgttcttgtcatttgtgttggggcccatagtgcagacgatcttagttttcttcatgttttcaaattcctccataaataaaatgaattggggttagtagtatattcgctcttttactgcctttttatgcccttggcacaggaataaatgtgtcaggccaagtggggatatgcagtgcaaaagcgcagagcatgccggtcgcattaatcattactgttactgttatcagcatcctcttttttgacatgcttatgtgtgtacaaatgatccatgcaatattcataattgccttcacatttggaacaataacggaattccataccaggactgtctttatctgtgcgtccgcagactgcacacttgtgtcctctctttaccactttcattttctgggtggtcttctggaattcctgggagcgtttcttctgcttaaaaccggaaggacctgcaaaggtcatccagccaaagaatacgccaataaggatcagacttaaaacgatctcgatcttctcgatcagtccgcctgtaataaaggaataaatataaattcctgcctctgccactgcgatccagcttgcctttaatggcagtaccatcataaacagtacctgcatatccggaaacatcagggcaaatacaaagaagaaggaataaaccaaataagttgggaacagtggcagtgaaagccctgttaccaggtaaatgccaatggcaacaaccgaatgaaggagcacacctccgataatgtagcagttaaagcgaaatcttccccatacctgctccacaatggtgccaaaagcacggatacagtaaatgccaagggcgttcatcagcacaaacataatggcatcagaacctgtaatggccggtggatacactaaaaatgtaacaatacgccagatctgaccgtgaaggatagccgccgggtttaagatcagataattcatcacaaactgcggtgctaccaggaaaaggaccactccaaggatctccagggcgcatacaatatcaatgatacttctgaaccccaggaaatttccgttccggcgtttccagttattggaaaattttcccattcaaaaactccttttttaaactgatttaactgattttaaaacagatctttcttattaaatatataagcaacgatcagtgtcaataccagtgtaaagaaaagcacgatgccaaatccataaggatgctctgcaaaaggcattccgctggctcttacgttcataccgtaaaaacttgccaccatagttggaatggacataacaatggtaacggttgccaggaatttcataacaatgtttaagttgtttgaaataacagatgcaaaggtatccatggtaccacttaaaatgccattgtaaatgctggtcatctccatagcctgcttattctctacgattacatcttccagaagatcagtatcttccgggtacttcttgatcttgtcaatccttaataacttctccagcaccacttcgttggaacgaagggaggtggtaaagtacaccagtgatttctgaagttctaacagttcgatcagttcctcatttttctgggactggtgaagtttgttttcaatgacttcactctttttatcgataatgcgcaggtactgcagatactgggttgcatttttataaaggatctgtaagataaaccttgttttcataaatgtgtggaaatctctgactcttccgtccataaaggcagtaaggatcggggtctcctccaggcagacggttatcagcacatccttggtggtaatgatcgccataggaatggtcacaaaccagtctttcccgtttctttcttctatagaaggaatatccaccaatatcagcgtatattcatcttctgcttcaatacgtgagcgctcttcctcatccagaggtgctttcaggtggtccggatcgatctggcaggcatcagcgatctctaagatctctgatgcagttggattggtcagggcgatccagcagcctggctgcatctcctctttttcgtgcattgcaccgtcttctgtcttgaaaatccgtatcatgcgaaatctcccccattttgaattttcaccctactcattatagtgactggcccggtttttgtcaaatcgtttcatattttttcatttcttcacaaattcttaaccccctttaacaattgccaagtaaaaggtattgtgttagactgtaatgtgattttttgggcttttcgcccggaattgtagtaagagacatgatgttctaacaaacaattacgtttcataagctataggatgtactctcagagtcttgaaagtacatcaagtcacgaaggaggtaaggggctatccccatatactatggatcagactacaacttattacaccctggggatcgatatcggttcaacaactgtcaaagttgcattactggatcaggatcttcatattatattctccgattatgagcgtcattatgccaatattcaggaaactctggcaggccttttaaagaaagccttaaaccagaccggccccattgatattatcccggtgatcaccggctctggcggccttacactttcatctcatttacacgttccttttgtccaggaagttgtagcagttgcatctgctctccaggactatgcgccacagaccgacgtagccattgagttaggcggcgaagatgccaagatcatttactttacagggggcatcgaccagcgtatgaacggtatctgcgcaggaggaaccggatctttcattgaccagatggcatcccttttgcagaccgatgctgctggactgaatacatatgcaaaagattacaaggctatctacccaattgcagcccgctgcggtgttttcgcaaaatcggatattcagccgctgatcaacgacggcgctaccagagaggatctggctgcctctattttccaggcagtagtaaaccagaccatcagcggtcttgcctgtggtaagcccatccgtggaaatgttgcctttttaggaggacctttgcatttccttcctgaactgagaaaagcctttgttcgcacgctgcatctgactccggagcagaccattgcaccggatcactcccacctgtttgcagctgtaggcgctgccatgaacccaaaggaaggccaggagccggtagctattaccgacatgatcgaccggctttccaatggcattaaaatggattttgaagtaaagcgtatggatcctctgtttaaggatcaggcagaatatgacgcctttatcgaagaccacggccacaaccacgtgcgttccggcaatctttctacttacgaaggcaactgctatctgggtattgacgccggttccactaccaccaaagtggctcttgttggagaagacggcacattattatatcgtttttatgataataataatggaagtcctctggctactgccatccgcgcagtgacagagatcaaagaacagcttccagaaactgcccatattgcttactcctgctctaccggatacggcgaagcccttttaaaggctgctcttatgttagatgagggagaagtagagactatttcccactactacgctactgctttctttgagccggatgtagactgcatcctggacatcggcggtcaggatatgaaatgcattaaaatcaaagacggaaccgtagacagcgtacagttaaacgaggcatgttcttccggctgcggctctttcattgaaactttcgcaaaaagcttaaattacagtgtaaaagatttcgcaaaagaagcattatttgccaaaaatcctacagaccttggtactcgctgtactgtatttatgaactccaatgtaaagcaggcccagaaggaaggcgctacagtcgctgatatctctgcaggtctggcttattctgttattaaaaacgctttatttaaggtaattaagatcacaaacgcttctgaccttggaaaacatgtagttgtccagggcggtaccttctataatgatgctgtccttcgcagctttgagaaaatttcaggctgccgtgcggtccgtccggatattgccggtattatgggcgctttcggtgcagcactgatcgcaaaagagcgtttccatatggccggtgaaaaagagaccaccatgctgcctcttgataagatcatcgcactgcagtacaccacttctatgacccggtgcaaaggctgcaacaaccactgtgttttaaccatcaaccagtttggaagcggacgccattatatttccggaaaccgctgtgagcgtggtcttggacttgcaaaagcgaaaaaagagataccaaacctgtttgattacaaatatcaccggatgtttgactatgaaccgctgcctttagaccaggcagaccgcggcgtagtgggtatcccaagagttttaaatatgtatgaaaacttcccattctgggctgttttctttaaaaagctgcgctaccatgtaacactttccccacagtccaccagacagatctacgaactgggcattgagtccattccaagtgagtctgagtgttatccggcaaagctggtacatggccatatttcatggctcatccatcagggtgtgaagtttatcttctatccatgtatcccttatgagcgcaatgaaagccctgaggcaggaaaccattataactgtccaatggtcacttcctatgcggaaaatattaaaaataacgtagaagaattaaagacagagcatgtagatttcatgaacccgttcatggcatttacaaacgaaaaaatcttaacagacggcctggtacgggaatttgtaaaaaaattccagatacctgaagcagagatccgtatggcagcccacgctggctgggaagaactgctggcatcccgttctgatatggagaaaaagggcgaggaaacacttgcctggatgaaagaacatggtaaacggggcattgtgctggccggaagaccttaccatgtagacccggagatccaccacggtatcccggaactgatcgcttcctacggctttgccgtacttacagaggactctgtttcccatatgggcaaagtggaacgacctttagttgtcaccgaccagtggatgtatcattcccgtctttatgaggccgcaagctttgtaaaaacaagagatgacctggatctgatccagttaaactcctttggctgcggtctggacgctgttaccacagaccaggttgctgagatcttaacaaagtccggaaagatctatactgtattaaagatcgacgaggtaaataacctgggagcagcccgtatccgtatccgttccctgatcgcggctcttcgtgtccgtgaccagaagcattatgagcggaaagtggtttccagcgcttacaaccgtgtgctgtttaccaaggaaatgaagaaggattacactctgttatgcccgcagatgtcaccgatccactttgacctgatcgaaccggcaatccgcgctttcggctataacatggagatcctgcagaaccacaaccgcaatgccgtagatgtaggtcttcagtacgtaaataatgatgcctgctatccatccctgatcgttatcggtcagatcatggacgcactgttatccggcaaatacgacttaaaccgcacggctgtctttatgagccagaccggcggcggctgccgtgcctccaactatatcggatttatccgccgggcactggagaaagccggtatgcctcaggttccggttatttctgtcaatgcaaatggcatggaaactaacccaggtttctccattacactgccaatgatgaccaaggccatgcaggcagttgtatacggtgacattttcatgcgtgtcctttatgcaaccagaccatatgaggcagttcctggaagtgccaatgcacttcatgagaaatggaaaaagatctgtattaaggctctttctaagagacagcctgctatgatggaatttgctaagaatgtccgcggcattatccgtgattttgataatctggagcgtcttgatattaagaagccgaaggttggtatcgtaggtgagatccttgttaaattctctcctctggctaacaaccatgtagtagagcttctggagtcagaaggtgcagaagctgtaatgcctgacctgttggatttccttctttactgcttctacaacagcaatttcaaggcagaacacctgggaatgaagaaatccactgcaaggctttgtaatgcaggtatcgccctgttagagttcttcagaaagactgcaagaaaagagctggccgccagcaaacattttacaccgccttctgagatccgtgatctggcagaaatggcaaaaggctttgtatccttaggcaaccagacgggtgaaggctggtttttgatcggcgagatgttagagctgatccacagtggtgttaaaaacattatctgcacccagccatttggctgcctgccaaaccacattgtaggaaaaggtgtgatcaaggaactgcgaaagaactatcctgagtccaacatcattgccgtagattacgacccaggcgccagtgaagtaaaccagttgaaccgtattaaactgatgctggctacggcgcagaaaaatctgaaggctgagaatgcttaataaacgcatttgaaatatttcaacaaaaaacaccgggaaatgtatgttgtaaaaccaacattttccggcgtttttcatcttaaatcgttatttctatgtatttctttactcgtacagcggatacttatcgcaaagcttagtaacctctgccttaatatactctttcttattctcaaagtcagtagctgccagccagatgcactctgcaatctttggcatatcctcttcctttaagcctctggtggtaacagcaggtgtaccaatgcggacaccggaagttacaaatgggcttcttggatcgtttggtactgtgttcttgtttaaggtaataaatacctcgtcacagcggttctgcagctctttaccggaaatatccataccacgcaggtctaacagcatcagatggttgtcagtgccgcctgtaaggatcttaaagccctgcttctgcagtgcgtctgccagtgcttttgcatttaatactacctgatgtgcatattccttaaattcaggttttaatgcttcacccaggcatactgcctttgctgcgatcacatgctctaatgggccgccctgggttcctgggaaaatagccttattaaagttgaacttttctgcagcttccttattcgctaagatcagaccgcctctaggtcctcttaaagtcttatgggtggtagttgtaacaacatctgcgtatgggattgggcttggatgctctccagctgctacaagacctgcaatgtgggccatatctaccatcagataagcacctacctcgtcagcaatctcacggaaacgcttaaaatcaatggttcttgcataagcgctggcacctgccacgatcagctttggctttgcctcttttgcttttctctccagctcatcataatcgataaagccttcgtcatctactccataaggaacaatgttaaaatacagtcctgagaagtttacaggactcccgtgtgtcagatgaccgccatgatccaggttcatacccataaccgtatctcctggttttaacatagcgataaatactgccatatttgcctgtgcaccggagtgtggctgtacgtttgcgtaatcgcagccaaacagcttcttggcacgttcaatggcgatggtttccagtacgtctacatactggcagccgccgtaataacgcttacccgggtaaccttctgcgtacttattggtcagtacagttcccatagccatcattacaggttctgaaacaatgttctcagaggcgatcagctccagatttcttctctggcggccgcactctgcctgaattgcttctcctacttccttatcataggaagtgataaagtccataactgtatttaccattgttctaccttcctttcagtatttgcccatacccatcgtattttgtcagtttatttatccagatatggtgttttctgcgattataccccatagtcatgtaaatttcaagtattcatttgcatacattttacgattttggcaaaaaatatacagactcatatttcttcctgcaaaaacacccctggcacacacgtaccagaggtatctcctcagtggaacttccagtccttcactaccagctgcagactgcggtttccattatattcatttattgtagggtaatagataatatccatgctctggctgtttcccatttcttccataaataagtcaccttctgtaaataccacgccgtccatggaaaagccccgttcattcatcagggataatttcactacattccggttacggccaaacactctggcacttcgtattttcagggatttcaaggcaaactgaggcttttcatttccctgtccaaaaggctctaaaagctctaattcccggatcaggctctctgttatatattcaaacggcatgggaacatcgatccatactcttgggataaaatcgtcctctgtaagccgttttgcagcattttcatttaaccgcctgcgaaattcttcgatatttgcctcttccagtgaaaatcctgctgccataggatggccgccaaactttaacagaaggtcttttacctctaccagagcgtgaaacatgtggtatgcctctatagaacgtcctgagccttttgcacagccttctgcccttgtaaggacaaatacaggcttattataatactcgcggatcctgcccgccacaatgcctgccagggactcatgacagtccggaagaaagactaccagcaccttatcatccttaagctctgtctccacctgttctatggcagcatctgtcccatccttggtcatgtccttgcgctcgtcatttaatgcctttaacgcatctgccagttcatctgcctgggccttattttctgccagaagcagttccatagccatctgggccgtttttaagcggccgctggcattcagacagggtcccagcacaaagccaacgtgataggcgcttatatgctccggatccagtgtatttttctccatcaggcttacaagaccctggatctttgtattagccagctttttaagcccctcttttactacaatacggttctcatccttaagcttcattacatcgcctactgtagcaatcgccgccagctccagcatatccagccattcctggcggtcaatcccatattcttcaaaaagtacctggatcagcttataagccaccatagcgccgcagatctcactgaacggatatttactgtcttttctcttgggattgacaatggcgtctgcagaaggcatgatctccgtttccgaaacctcatctacctgaatatcatggtgatctgttatcactaccgtcattcccagttcttttgcttctgcgatctggtcaatagcagcaattccattatcacaggtaagtatcatgtggatgccgtctgcagccgccttttcaataatatgttcattaataccataaccgtctttgatacgctccggtattacataatcaacttttgcgcctacacggctaagtcctttgtagagaatgcaggtagaacacacaccatcaatatcataatctcctacgatccggatccgggcaccggcagcaatcttttcttttaatatagaaatggccttttccatatccggcagcagccttggctcatacagatcctttaaacttccgtttaaatatttatcaaattcatctatatctgtaatatccctgtttctgataatacgggcagtaatgggactgatatgaaatcttgccgccagaccattaaaatctgctttttttgcatgaagcatccagactgcttttgtcattcttttctccatcctctgttgatcgatcattttttcagtgtatttgcgattatatgacaacaaaaaaagcagactcacgaagaatctgctttttacatgcgccagagaagattcgaactcccgacactacggtccgtagccgtatgctctatccaactgagctactgacgcatttctttttgttgcttgctgtgttcctcagcaacgtagattattataataaatgatatggtttttgtcaacacttttttcaaaaaaattaaatatttttttcaagcctgtcaaacccgcatatttactggatttttgccgttttctttttctgcctttaaaagaattttactactttttatgttctgcacagacctgttccatcacttcccggatcgcatcaagagacttctgatccatatccgggatccattgcagcttttctacttcgcctgcaacctgctcaaaagaaagccctgtcccagtcatccggtccctgatatggacataacataataacaagtccgtttcgtctttttccggtaatctttttgtcagttcctgtcgaacctgttcccgctctttttcaccgccaggaaatacccgttccatataatcccttgcctctttttccttttctgctttgctcttgaaattaaatccaaatatttccattttctcccctgtctctccacatatatattctctgcaaacaaaaagtagccagactcctgctttttcagaaatccgactgctatagtcaactgggctggcgggattcgaaccctcgtatgcaggagtcaaagtcctgtgcctttaccgcttggcgacagcccaagatattaaaaaatcctcttcctgctccagaaagaggattagggtgagtagagggattcgaaccctcggcctccagagccacaatctggcgcgataaccaacttcgccatacccaccatcaatatttttttattaggcttttgcctaatgagcctgaagggattcgaacccccgacccacggcttagaaggccgttgctctatccaactgagctacagactcattcgtcagcgcttaccgcaccaacgaggtatatattatcacagagctatcataaatgcaagcacttttttcaaatttttttaatttttttcaaattaattttcagagcctttttcatgccttttttaaacggctctttttaactccataagcgccggaagctccatgaatcagaacactgatccgcttatagataactgcagtgatcatagaagtaagggcaccttttaccaggttaaatggtcccacacagaaaatagccagtgtccatacgctgctgactgccggattgacagctgctcctgctttgataatggtatcgataggcataaagttggaataaaacgggatcatgaccagagcattcattacaacgcccacaacagccataagaaccgttcctactgccattcctgcaacagcaccggtcttgctctttttaaagcggtagataaagcctgccggaaggatcagggcacagctcataactacattggcaaattcacctacaaaacctgtagaagttggctttaagatcagtttgatcaggatctttacgatctgcatcacaataccggctgccggtcctaaagcaaaggttccaaccagcataggcacttctgcaaaatcaagtccataaaagcttggtgccaaaaatggcagcggcacttcaaaaagcataagaactgctgctaacgcgccaaacatgcccataagcactacatttttcgtgttcagtaattttctttccatcattacgttcctccctgttatgaaatatactttttggttctttcaggtatctgaaaaagcccgttttcgtaagttcatcttctgaggaatatgcgctttcatatcagttcaaaaagaaaagcataaaaaaaccggatagccgatcaagctatccggggatttactgatattttctgtttctcctatgtatttcttttcatgaactacatcaggaccaaaacagtcgcatcttcttctctcatccagactttactgtcggttccggaatttcaccggatcggccatataacatggttcgcggactataccgccggtagggaatttcgccctgccccgaagaacttatctgagtatcagtatactatcttctattttcgccgtcaatagggtttggcaggaaaaatacgcacacaaaaagcaggtgatggggtgccaggtgccagtggcacctgtttggcaccgaccgaaacggagtgtagagttaagcgccagtggcgcttgtttaacgccgaccgaagcggagcgtagaccgaacccgggttcgatgcccatcgctggataactcaaaaaagagcacataaaaagcaggtgatgggaatcgaacccacgtatctagcttggaaggctagtgttctaccattgaactacacctgcatatcatatatctattcttttgtataagtcggggtgacaggattcgaacctgcgacctcctggtcccaaaccaggcgctctagccaagctgagccacaccccgtcgcaacgtagattattatatatgacctttataattttgtcaacacttttttataagttttttttaagagttttttcaagtatttcacaaatcgtttacagttcagccctggcatcttcttgtttccatgatccatgaaaacaagaagcctgtcgggtccaccgtatgctgatttggctgaactgtaactacagataatgctgctcaaatctggcttccccattatcatcgatcttcatcagcatataagacggtctgtggccttcctgccttggataagagaggctgcccggatttaaggtaataagctctttttcaccggatttatcaatgtcaaaataaggtctgtgggtatgaccgaacataacaatatcaaatccccgctctcttgcttcctgtttcagataagccgggcctgttgatacattataataatgtccatgggtcagaagtaccttgtattttccgatcatgatctctttttccctctctaactgggagaaaaagtcattgtttcccatgatcatttccaggtcacagtccttatctacccatttcatgatctcatattcactgccttccgcatctcccaaatggatcagcatatcaaaaggctttgttttacggatcacccattttaaattttcatcttttctgtgggtatcactgacgatcaatattttcattttcctgcttcctcttcctttaaagcctttttcatagcttccagtgcttttcctctgtgactgatctggttcttttcttccatggtaagttccgctgatgtttttccaaattccggaagatacagaataggatcataaccgaaaccaccatttccagccggttcctttgcgatcagaccttccatataggcttctcgctggatcactcttccatcctctaagacagcggcaatattacagacaaaacgggcactgcgttcttttccctctgcaccggagaggcgttcaatgatattgcggtttttgatctcataagaggtgtcttcccccatatatctggcagaataaactcccggttcaccgccaatataatctactgccagcccggaatcatctgctaaaacgataccgcctgtctgcttccacactgccattgccttgatctttgcattttcagcaaatgtttttccatcctccacaatatccagatcaactcctgcttccttcatagaaagcaccggaagtcccagatcagaaaggattgcgcggatctcccgcatttttcctgcatttccagttgcaaatatgattttcttttccatgttatcaccttttcatatggatatcagcttctatttttctgtatgagtatatactttcaggcacagattgcacttctgggtctcttctacatgttcccagagcgaaccgttgtggcttaaataaccttcaccgtctgtcaggtccacctgggcaatgccatctcctgcatcatactcaatggccactggatgaacagtatccggtgtttttatttccactattatagcaaatttttccccctggtccaatactattttttcattaaaagggatcgtataataaccggtatattccatttttccttctgccaacaatatccgcttatttaaagccatttccatcatatgatcctgatgaagtttttcttttcctgtactgtccctgtccggcagatttctggctgcatagattttatactctgtgccagcccctgttgcataaaaaccggctgctgccagttcttccttggtttttgttttgtaagcattggcaaaccaggccgtgtcttccccatatccgatctgtcctacccatccacacagatcactttgataaatgttgtcataattgtctgtaggctcaattcccgtgtatacaatattatggaccccgatattcgtatcataataggacacgtaaaaatagccctggtcaccaaagttctcgccccagctgttggtacagataaaagcgccgtccccttccagctccatattgaagttttcttttggataatcatcatcccagcctacgatcacagaatcatggttgggcttttccgtaccgatataacaataggaattggtatcacgattgtaataaacagactcgctttcataatcccgcatggacgtataaagggaactttgcacaccgccttccagataaactgcttttttgatcgcttcgtaatcttttgacggcagtatctgtatctcctggacatgttccctggcttttaaaccatctggcgagaaaccatctccataaggatcttccgactcccatacagggccttcccaggagagcagatacgccatagacatggtgtattctcccccctcatcctgtcccaggagaaaatgattgtgcatggacatgtgatccactgaaaacgtctctttctgtttgggcagcagggtagactctaaagcagtaagggaagcaaaggcccagcaggtgcctaaagagccctgatttccgatttttggtgctctttcatgctctctgtagtcataagaagaaggcagatctacattggaaggccattcccggttccagatctcaggtactgttttcccagttccggacgtctttggctcctctgtatcatctgtcttttctgtactgccagttatttccccgtcttcggcatcttccccctttgttttttcttcggtctggtcattggatctggaagtctcactttctgcaggaagaggcatttccccattttgcaacgtaccgcagcctgtaagaaggactgcgcacaatattccagacaaagccgttcccgcaaacgtggaaacggctttttttaactgcatttttattctttttttaatcaacgtttcggttctcctgactgcgttttggcggtctgggacccatgaactgatagaaataggtttttaacataccattgtagatcttgcggtttttgtctgccttgcggccaatgtatttctctgcatcctcataagaggtgatcagatacatggaccaggcatccaatgctgcaaaacgctcaccgatctctgtatacagagccgggaggttctttttctcttcaatacgctcgccataaggcgggttggaaatgataaaaccatatttcttcggatggctgagagcgtttaccggacgctgctggaaatggatcatgtggtccacccctgcagactgggcattggctctggctgctttcacaatatccccgtcaatatcatagccctggatatctacttttactgtatcatctaacaggtcgtttgcttcgtccatggcttcataccaatattttctcttaataatattcttccagtcctcagataagaaggaacggttcatacctggtgccatattggctgccatcatggctgcctcaatcgggaaagtaccgcttccgcaaaatggatctaccagaatacggtccttgttccatggagtaagcatgatcagggctgctgccagtgtttctgtaataggcgccttgctggtaagagtacggtagcctcttttatgaagggagtcaccactggtatctatgccgatggtaacaatatccttatataagaacacacgcagcgggaattttgccccgtcctctggaaaccaggatacatggtaatgctctttcatccgctctaccatggcctttttcataatggactggatatcggaagggctgaacagcttgcttttaatagaagaagcctttgcaacccagaattttccatcttccgggataaattcttcccaggcaatagctttggttccctgaaacagttcctcaaaggtctctgcacgaaaactgcctgcttttaacaggatacgctctgcagtgcgtaaaaatacattggcacggcagattgcttcatcatcgccaataaaagtaactcttccatcttctacctgggagatctcataccccagatccagtatctctttttttaatacagcttccagcccaaaatgacagggtgcgatcagttcataggtctgtttcaatccttcgtcctcacagttctaaattcattccattttaagtttcgttttcagtttcacattataaatgttatgttaccgttcagcatttacagcttcagttcttttactacttcgccgtccagggaataaatggtaaatacaccattttccaggatcgcataagtatttggatttccgcccttaggaatagaaacggaacccggatttaatacggtaatggttccacattctgtttccaccttttctgctttcagcagatgggtatgtccatgtaccaggatatccccatcctgcataggcggcagatgatcctgattaaatacgtgtccatgggttgcgtaaaatgtctttccgtctaatactaacagcgcataatctgccaggatcgggaactgaagtaccatctggtctacttctgtgtcgcagttgccacgaacagcgtagatctggtcctttaatggatttaacatggcaatgacctcttttggtgcatactcctttggaagatcatttctcgggccatgataaaggatgtctcctaaaatgaccattctggatgcttttgtttctttataaatgtctaacagtctgcggcaatagtacgcagaaccgtggatatcggatgcgaataaaattttcatgaaatttctccttccattcgttaatggtgcaagaaaaacaaatgccgccttacagcggcgcttgtttttctcctgccccattatcttacagccccaaactactatctgtcaatgtattttcctctgtaattcaccattccgcctgcaaggtctgccacctcatatcccatgcgccacaggtcccggcagatgaccatgcttttggcgcctctttcacacaagaatactgtcatttctccataatttatctcccccatatgatcccagaactcatcatagggaatattttcacttccacggatccgttcttcttcatacagccatggttcccttaagtcaatgatccgccgtgcccgcccgttctctatccaccggtcaaattcccagtaaggaagcattggaaaaccagtcatatttccaccttctttccagatatgcgaatatacgaactatttcaaaacgttatagacaagtcttcctattatcaatatatgcccgtcctgtctggtgggtacaacctgggagcagcacataaaaaacggtcactgaaagtctgttcctttcaatgaccgttttatttctggtatctgtgctcttgccagtacttacagatccagggatttaatattcagttttatttctgctgttattcttcatgttattcttagatgtggtcctggttgtgttctcggttttattttcggtcttgtttttagccttgttctcctggttcatgttgctgcagtcatccatccggttgctgtagcggttactgtaatcattgctgtagtcattctttgccatttcaatacctccaaaaagatatttttttatattaacttcaagttacagctttattatggctgtatcctgatggtttatacgtggcttttgcagaattttattttacagttcagccatgcgctggtttgaatgagaaagtgtgttgcaagcctgcttgcataagcactttttcatccaaatcagcatatggtgggaccaccaagcttcttgttttcatgaatatggaaacaagaagatgtcatggctgaactgtaacgtaattcccacctttttcctgggaatttacttgcattttccctgtatttatattataactaatgtgaggcaacatggtttcccttaaaccatagcctcatccttattaattatttatactccccttgagaaaagccaggatagctcccctatcccggcttttctcccgtttatgagacaaatttcccaacctgcgaaaaaggcccttctgccgacggcagaaaggcctgtctatttttcaatatcattttaattcattatcccagcacacttacgatcttcaccggatttttgtaattccagttagaaaccttaatacctgttgcttcggtagaagcatgtacgatctttccatctcctatgtacattgctacatgattgatactctttccgcttccgtaaaaaagcagatctcccggctgcatcttggacgcgctgattgcagttccctgtgaagcctggctgcctgaagaacggtttaaagaaatacctaaaccatgctgatacacatagcgggtaaatccggaacagtctgttcctgtatgtgggtcactgccgccgtaacggtacggaccacctacaaactgaagggcataacttacaagctgctgtcttttgtagctgttggaggactcaatggcttctttctggacctgttccatctcgcctgcttctgcttcctctacctctgcatttccggaaacaggaagataaccttctgtatcatttacgcggatcttcatccagccatttccaaggtcttctaatacttcaaaaacactgcctgctttggctgtggtcaaaacatcttctccatcttttgtcttgttgatgtttacgctttctgctgtaatagtcgcaatatatgttcctgttttaaatccaggcccgatggctgccatggaagtcatcggcactgctgtcatcaatattccacatacaagtcctgttctaaccagtttaccaaaaaaattatgcattctcatcccatcctatttgttacggtttatgttaaatagttgcttttaaatgttacataaatgttacgttaattacatttgtattatatcacagctgagagcttcgtcaatatttttatttttttttaatatttattaatatttttgacagatttcacaatttcttcacaaaaaaatccctggtaccttgctggcaccagggatttgtaatgatctgattgaatgatctagcttaaaacactgacgatcttcaccggcttacggtagttataaggagaagtcttaataccggtagcttctgttgaagcatgaacgatctgtccatttccaatgtacattgctacgtgattgatacctgcatcatcgccgtagaagatcagatctcccggctgcatttcctcttctgaaacctcagtgccatagttagactgccctttggaagaatgaggaagactgatggaagcagtattctgcaaaatatatctggtaaaaccggagcagtctactccattattggggtcaacaccgccaaatacataggttccgcctacaaactgaagggcaaattccacagtctgacggcgctgtctggcagaaagatccactgtttcacggtttttttctacaagggaagcttttcctgaagtcttaatataaccttctccgctgcctgtgctgatcttcacccagccatttccctgattggagaggacctcataggtctgtcccctttttacctgtcctacagaacggctgtgttcatttgcggaaagatgtacttctacagaaggcgctgcgatcgtcaccatataagaagagcgtgtctgtacttctgcccctttagaagcagccagactttctcctggatttacaaaaagaatacctgataaaagaaaaagacctgcggcagcctttaccgcatgtctccgaaataaagcaaaattcacgctgaaagtctcctaactgtcgaaatagaattgttacggatttgttacgaaccaacaacgcaattatattattttttcacaaaaatgtcaagaataagacatgatttatatacataaataggcactttttaaaccaaaagtgcctacttactttatcgcaatcaattgtaatcttatcttcccggtcccttaaacatccagaagatcattaagatcagaagtaccggccagatataagacaatacccagccagccagtcctatgatcccaaagaacaggctcataagcaggaagataatgaaaaatacgatcagtcctgctgccagtctcacataccatttgctgaaatctacataatgtacatttctatggtatgtatcctgataagactcttctctgtctactgtgccataggggccactgtactcacggctctggctgttatcatctgcttcctgtgtctctccggagccataagtttcatagccgtccggacgatcttctgtatttagtgctgcatctacgatcgtcctggcaatgatccttgggcctccaaggttttcgatcacctctgcctcatcagcccctttgcttatttcatctgaaatgtatgaatcataatatcgtatattttcctgaatcacggaatacggaacgcgcccttccagttctgtcctcagtccctgtaaaaattctgctctggtcattattcagccctttcctttattacgccttcccggtatgccgccactaattctttcaggtctgcgatctgttcctttaattcacggcccttatccgtatctgccaccatgatcctgaccttcagtttttcaaccacagacaccttcggtgtactgtctttcttcgggtcaaatggcatatgctctgccagtgccagatgatgtgagttgtagatcaatgtatatcctgcaatgccggtagtgctctgatatgcctttgaaagaccaccgtcgatcacaaaaagctttccccctgcttttaccggtttttccccgtcttttaacttaacaggcacatgcccgttaataatatgggaaccttccgtttttaagccaaattcttccaggatcttgtcacagatctctactttttcacacagtttgtagtaagggttcatcacctctttatgtgttgccttatcttctacaaaatagtgttcaaaggtagtcatctttgactttccaaataccggagatcttgctccgcaccagagataccacatcagatccagtgcttcttcttttccatctgcaccgtccggaaggaagtaggcattatgtacctgacggtttaagaaatccatcagggactttcctttataaccatttccaccgatcataatggtatcaaatgctccatcttttgtcataggaatacatccgtgatacagcagattggagttgtagcacttgtaaataccaccatgagaatagataaatttcacctgacgctgtaaaacctcgctgtggcggaatgacgcgcagagagtgcgtaacagttccttttctcctctggtcagctccagtggatttcgcgggtcaatggtcgggaaattcatatccagcattgggtattcttttccttcaatggtaacggttcctttcttgtaatccactgcagttaaaagcatgcggttttccatctcatactccggatggcgctgcatcatcgcttcttctaccttaaactggatcacagcaattgccttgtgcatcttagctgccaggccaggatctactgcatcataaatattttcatccaggatctttggcataaagcggacacatggatcatcctggtaaacttttgccgcaaacatggacagtggacgcagattgataccgtatccatcttccagcacatcaaagctgttgtagctgatggctatacgaagcacattacagatacaggccagattgccggcagctgctcccatccaggaaatatcatgatttccccactggatgtccacatcatggaagttcattaactccttcatgataatatccgctcttggtccacgatcaaaaatatcgccgataatgtgaagattatcaatggtcagattttggatcagacggcacagcgcaacaataaacttgtctgctatactggtatcaataatagaatggatgatctcattgtagtaaagtttcttgttctcatcgctgtagtctacatggagaagctcatcaataatataagcaaactccttgggcatcttttttcttaccttcgaacgggtatatttggaagaaacttcgcggcagatcttaaccagtctgtaaatggtgatcttctgccagtcttctgtataccgtccaactttcatcatccttggaagatgacgctctggataatagatcagatttgctaactgtaactgctcctcctccgggatcaaatgtccgaatgtttccttgatcttttcacggatgataccggaagaagaccggagtaaatggataaacgcttcatactctccatgaagatcactgaaaaaatactctgttccttttggaagactacagatcgccattaagtttacgatctcactggtagcttccttaactgacggatattcacgcgccagaagctgcagataagccagatccctcatattacattcccccatcttatcgcattttcctttctttacatgtcccaaaaaagactttatcaaggaaatcttgcgttttatatgggattatagtaccatattcttattgaaaataaaagtttttccgcaggaacacaagcttacattttgttaagatttatgaagaaatgcacaagaaaggatcgaaatatggaagaattatacgtatttggtaccggaaacgcacaggcaacccgctgttacaatacctgctttgccataaaagacggagatgaattttttatggtagatgccggcggcggtaatggtattttaggtattctggaaaaaatgaatgtggacatggcccatatccatcacatttttgtcacccatgagcacaccgaccatatccttggaattgtctggatggtccgtatgatcgccactgccatgaaaaaaggaaaatacgaaggggaacttcgcatctactgccatccgggactggcagatacgatctctaccttatgccgtttaacacttcaggggaaattttataaaatgatcggggaacagatcttcctgatcccggtagaagacggagaaaccgtttctattttagattatgatgtaactttctttgatattttgtctacaaaggcaaaacagttcggcttcaccatgcacctgaaaaacggaaagaagttcacctgcgccggagacgagccttacaatccggaatgtaagccatatgtggaaggcagtcagtggcttcttcacgaagcattctgcctctatggtgacagagaacggttccagccttatgaaaaacatcacagcacagtaaaagaagcctgcgaactggcagaaagcctttctattccaaatctggtgctgtggcatacagaagataaaaacttaagccacaggaaagaactttacacagcagaaggaaaagaatattatcatggaaatctgctggttcctgatgacggggagattataaaactgtaaaacatgtcactgatattttttatgaacccatgataacgcagcacagcctccagaattggaacattttgttccttttctgaaggctgtttctatgtctgccggagtaccgcctgcgccagcaggcgttctctcttactgctgctttttaatatgccatcttataaatttcaataatatccggcttgtccaataccttaatacctgccagtgttcttgtgccgtggttggtgcatttttctgccagttcttcaaaagatgcaggatccacattcagttctcttaaagaggttggcatattcaggctcttgaaataatcttctgtagccttaatacctgccaaagcggtcttttccggatgctcaaaatccatttcaatgttccatacattcactgcgtactgggcaaagcggcttacattattttcatatacatatcttgcccaagatgcccataaagcagaaagtcctgcgccgtgagcaattttctcatccataccggataattcatgctccatctgatgtactgccataaaaacggatcttccaaggccggtcaggtcattgtgggaaatagttcctgcccacatgatggacgctcttgctttataatcatttggattttccagtgctgcttttccagccgggatcactgtctttaaaactccctctgcaatacggtcggataatggtgtatcctcaccaacactgaaatagcgttctaacgtatgcatcataatatccacagctccgcagccggtctggaacgggcttacagtataggtcagttccggattgcagatagagaataatggtctgtgtccagggctgttaaatccgcgttttaagcccagttctgtattggtgataacgctggaagcactcatttcacttccggttgcagacagtgtaaggataacgcctaccggcagagcagcctttggagtttcctctttcatatagaacttccatacgtctacatccgggtttgcaataccgtctgcaatacattttgcagagtcgatgacacttccgccgcctactgcaaggataaagtcaacgccttcctttttgcccagttcaatgccttctcttgccatagccagagtcggatttgcctgaacgccgcctaaggtcacatagtcgatattttctgcctttaaggcatctaatacagtatcaagaagcccgctcttctgcgcgcttgcaccgccgtaatgaacgaaaaccttcttaaaaccgtactcctttaccagttttcccacctgcttgtgagtatcttttccaaaaatcatccgggttggtgcataaaattcaaaattctgcattgccttatcctccatacgatcattgattttatactgcctgatcttggaccatttaacatggccaatctattcattatcttaccatatttttccttttgtaacaagggaaccccttgtaagaaacatatcccagtcataatcagcatatgattatgggtacaggtatcttaagcaaacttgctccagaacaaaagggggatattatgtctttttccagaaaacgttcatttcgttcatttttctttatcggtacggaactttttgtcctggttcttttatgtctttgcctttttatgaaaagaacggaccggcaggctggtattttccagacttccggtgattttattaaatgggtggattttaatgttacctgtgaagcgttggagcaggcgttccggtacgatgtggatacctgccaggcagaggttcatttaaattgggtggacctgctggcgtatcttggaacacgctatggcggggatttttccagatataagaaaagtgatatgaaaaaggtggcggaacagctgatcaatggtgaaatgaccatggaagaactgacaagcgatatgaaatattatgactattacagacaggcttatggggcggtgttagacggaatggtagggacattccaggcagagatcccggcggatgaagtgccggaaatgctgcagcaatctgcgcaaaatactgataccgtctgggtcacaaaatacggactgaaagccttcttcccactggcaaagaactttccttacaacgactttgatgatttcggagtctcccgcagctatggcttcaagcgccgtcacttaggccatgacatgatggggcaggtgggaactcccattatcgcagtggagtccggctatgtggaagcactgggctggaaccagtacgggggctggcggatcggtatccgcagctttgacaaaaagcggtactattactacgcccacctgcgcaaaaactaccccttccagtccaatttaaaagaaggcagcgctgtccaggccggtgatgtcatcggatatatggggcgcaccggctacagttccaaagaaaataccaacaatgtcgaagagtcccaccttcacttcggcctggaactggtctttgacgagtcacagaaagaaagtgaccatgagatctggatcaactgctacgaactggtcaaattcctgcgcaggaaccagtgtgaagctgtaaaagtagagggcaccaaagaatggaggcgggtatatcagacgaaagatgttcccactgcatagaaaaagaccagccgcacaatcgtgcggccggcctcaaatcaacttatttaacttaatctgtggataaataatccacttcttaacttcggctcaaaccaggtagacttaggcggcattaaaaggcctgcgtctgctactgctaaaagctcttcaatggaagttggatacatggaaaaggcaatctccatatcttcgcttacacggcgttccagctcttttaaaccgcggatgccgccgataaagtcgatacgcttgtcggttcttggatcaccgatgccaagtaccggtcctaacagctggtcctgtaaaatggaaacatccagaccctttaccgggtcagcgctcttgtactgaggaagtacctttaaagcataccaggtgttgtctaagtacatgccaaaggttcctttttcagctggagcatatggttcttttccaatttcttccagttcaaatttttcttttacagcctcaaagaactgctccctactcagcccgtttaagtccttcactacacggttgtatggaaggatcatcagttcctcatctgggaataaaacagacaggaagtagttaaatggctcttctcctgtgtatccaggattttccgccctgcgctttaagccaaccttcacagcggaagctgctctgtggtgtccgtctgcaatataggtagccggaattgccgcaaatgccgcctcaatggcttctgtctgtgccggatcattgatcttccacactctgtggcggatgccgtcatcagatacaaaatcatagagagccggttttgccttctcttctgctacgatggccttcaaggtctcattctgtctgtaagccaggaaaatagggcctgtctgggcatttacagtatctacgtggcggatacggtctatttccttgtcttctctggtgttctcatgctttttgaccacaccgtttacataatcatcaatggaactgcaggcaacgatacctgtctggctgcgtccatccatggtcagttcatacagataataatgatctcctgcatctgtaacatataccccttctgcgatctgggtatctaaaagctctcttgctttttcgtatacacagtctgcatacgtatccacatcatcggaaaactgagtctctgccctgtcaatatttaagaaagaaataggatttcccgctactgccgcacatgcctctttccggttgtatacgtcataaggaagagctgcaaccttagctgcattctcctttgcaggtctgatacatataaatggttttactactgccactttcttctccttctgatcacctttatttgttacagttcggtcatgacatctgtaacattatttcactacacgtacccgtaaaacgccctcaatggcctttaatttctctacagtagtctcttccggcttgtgttccagatctaataaggtataagcatacttatcacggctcttattggtcatatcagaaatgttcacgccctgggctgccaggatggcagtgatctgtccgatcatgttaggaatgttcatgtgaagaacggcaatacggcttgctgcctggcatacgcccatatcgcaggccggataattaacagaattcttgatattaccattttccagataatctgtgatctcctgtactgccattactgcacagttgtcctcagactctcttgtggaagcgcccagatgaggagtcaggatcacatgtttcatatgtactacctttggatttgggaagtcgctgacataacgggcaacttttccagcctccagtgctgcggccatatcatcatcatttacaagagtatctcttgcaaagtttaagatcaccacgccatccttcatcatatccagtttttctttgttgatcatgcccttggtagactctaacagcggcacatgaacggtgatataatcgcactcctggaaaatagtatccacgttggtgatgtgctttacatttctggaaagtctccatgctgcgttgacggagatgtatgggtcgtagccgtaaacttccattcccagatgggtagctgcattggcaacctcagcaccaatagcaccaagtccgataacacctaacttcttgccctttaattcccagcctgcaaaagcctttttgctcttttcggttgtttttgcaatgttttcatcctctgcattgtcctggcaccatttaataccacctacaatgtcacgggatgctaaaaacatacctgcaagaaccagctcttttacgccgtttgcattagcacctggtgtgttaaatacaactacaccggcctttgcgcactcatctaacgggatattgtttacacctgcgcctgcacggcctactgccagaagtccctcaggcagctccatttcatgcatggaagcgcttcgtactaaaaaggcatctgcctctgctttgttgtcggtcatttcataatcagccgggaacaggtccgttccgcaggctgcaattggatttaagcaatggatctttttcataatactctctcctctttacagatgcttcttctcaaagtcagccataaactcaaccagcttctctacaccggcctttggcattgcattgtagatacttgcgcgcataccgcctacggttctgtggccctttaagttttcaagacctgctgcctttgactcttttacaaataaggcatccagttcttcatttccggtgataaatggtacgttcatgatagaacggtctttctttactacagtgcccttaaacagcttgctttcgtctaagaagtcataaaggatctttgctttctcctcgttgatcttcttcatctcttccaggccgccttttgcctttaaccacttaaatacctttccgcacatgtaaataccgtaggtaggaggtgtattgtaaagggattttgcatctgcatggatcttgtagcgcaacatagttggggttccctctaatacgtcttctgtgatcaggtcctcacggatgataacgataacagtacctgcaggtcctacgttcttctgtgcgcctgcaaagatcaggccgtatttggatacgtccacaggctcagataagaagcaggaagactgatctgctactaacagttttccctttgtattcgggagagtccagaacttggttccgtaaattgtattattttcacagatgtacacataatctgcatcttcagatacaggcagatcggagcaatccggaatatagctgaaagtcttgtcagcactggaagcaatggcatttgcctttccgtaaatagatgcctctttgtgtgctttctttgcccactgtccggtaatgatataatctgccacacgattcttcatcaggttcataggaaccatggcgaactgggtagaaccgccgccctgaaggaaaagcaccttataattttccggaatgtgcaagagatcgcgcagatctgattcagcatcttcaataatggtctcatatgacttagatcgatgactcatctccattactgacattcctgtacctctgtagtccagcatttctgctgctgcttcgttcaggacttcttccggtaaaactgccggtcctgctgaaaagttgtaaactctgctcatagttttcctcctcttggaattctcttggaatatttggtgcttattatttttaatttttgtgcacccttttatctatatatgcaagcggctcccctgcatgatgcaaatgggaaaattttcctgcatcacacagagaagccacctgtgtatatacgcccttgtataagtaatcctatcttttttcttactttatcagtataaaccaataacatggtaacgttccaaggtgttagaaattactatacaacgtttcattttatttttcaagctaaatttatctgaaactttttttagttttaaataaatcattgaaaattatttagttaattttcaaatctgtatcatcaaatgcatctgcgatcggtgctccaggagataccattgggaataccttgtcgtcgcagccgatctggcagtcgataacaaccgggatatttaaggagatggcctcttttaatacaggagccagttcttccttctgggtcactctgtaagcctttgcgcccattgcctctgcgatctttacataatcaacagagtcgttaagtacagtctgggaataacgctttccgtaatacagagtctgccactgacgcaccatacctaatacatggttgttgatgatcagttcaatcaccgggatattataacgggtagctgtagcaatctcgttcatgttcatacggaagcagccgtcacctgcaatgttgatgaccgtcttatccttgcagcccattttagcgccaatagaagcgcccaggccgtatcccatggttcccagtccgccggaagtaaggagagttctcggctgacggtatttataatactgggcagcccacatctggtgctgtccaacctcagttacgatcacagcgtccccgccggtcacttcatttacagtctggataatgaaaggaccggtcagtacgttcttgtcatagcgcagaggatacatatctttcatacgctcaatatgagcaatccattcgtcatggttgatcggatccagatgggtatttaaccggcgtaaaatggtcttggcatctccaatgatacttgcgtcaaccttgatatttttgttgatctcagcacggtcaatatcgatctgtaagatctttgcatttttcgcaaatttagatgcatttccgatcacacggtcactaaatctggcaccaactactactaacaggtctgcctctgtaatgccgtagttggaagtcttagttccgtgcataccaaccatacctgtatacagttcatcggtaccgtcaaatgcgcccttacccattaaactgtctgcaaccggtgcctggatcttgtgtgcaaacacccgcagttcttcagacgcattggagataacagcgccgccgcctacgaagataaatggcttctgtgccttgcggatcatctctaaagcacgttccatgtcttcttctctgatagtatcagtctgaggctcgatcttctccggctcctgatactcataatccgtgatagccgcagttacgtccttggtaatatctacaagaacagggcccggtcttccgctctgggcgatgacgaaggctctgcggatcacctttgccagcctgttgatgtcttttacaatgaaattgtacttggtgatcggcatggtcacacctgtgatgtcgatctcctggaaactgtccttacctaagaggctgtttgccacgttacaggtaatagccactaccggaacggagtccatgtacgcggtagcaatacctgttaccaggttggttgcaccagggccggaagttgccaggcatacgcctacctttccggttgctctggcatatccgtctgctgcatgggaagcgccctgttcatgagatgtaaggatatgggtgatctcattctggtgctgatacagcgcatcatatatgttcaggatggcaccgcccggatatccgaaaacggtgtctaccccctgttctttcaaacattctataacgatttccgcacctgtcaatttactcatttgtcctgtgctcctttacgaaataatcctgtatgctgtccttattttgcctgaaggatagcgcccttgtcaccggaagttaccagtgaagcatatcttgccagataaccggtggttaccttaggctctcttggctgccatttagcctttctggctgccatttcttcatcagaaaccagtacgtttaactgatgattatcaatatcaatggaaatgatatctccctcttctactaaagcgatcgggccgcctacagctgcctcaggagaaacatgtccaatggaagcgcctctggaagctccggagaaacgtccgtctgtgatcagtgctaccgtagagccaagtcccattcctgcaatagcagaagttgggtttaacatttctctcataccaggaccgccctttggtccctcataacggatcacaacaacatcaccgtcaacgatcctgccgcccttgatagctgcaatagcgtcttcctcacagtcaaagactcttgccggtccttcatgctttaacatttcaggagcaactgcagaacgctttacaacgcctgaatctggcgccaggttgccctttaagatagcgataccgccggtctggctgtatggattgtcgattgggcggatgacatccgggttcttgtttacacagtccttgatgttctctccaacggtctttcctgtaacagtcatgcagtccagatttaacaggcccttcttgctgatctcattcataacagcgtagattccgcctgcctcgttcagatcttcgatgtaggtgtggcctgcaggtgccaggtggcacaggtttggtgttcttgcgctgatctcatttgcaatgtctacgtttaactcaacgccggcctcatgtgcaatagccggtaagtgaagcatactgttggtagaacatcctaaagccatatccatggttaaagcattcataaatgcttcttttgtcataatatctcttggacggatgtttcttcttaacatctccattacctgcatacctgcatgcttagccagcttgatacgctcagagtaaacagctggaatggttccgtttccacgaagtcccataccaagaacctctgttaagcagttcatactgtttgcggtgtacataccagaacaggaaccacaggttggacaggtcttattttcatattcttttacatcttcttcggtcatctttcctgctgcgtaggcgccaactgcctcgaacatactggaaaggctggtcttacatccctttacgtggcctgcaagcattgggccgccgctgacaaatacagttgggatatttaatcttgctgctgccattaacagaccaggaacgttcttgtcacagtttggaaccatgactaacgcatcaaactgatgagctattgccatacattctgtagagtcagcgatcagatctctggtaaccagggaatatttcatgccaacatgtcccatggcaataccgtcacagactgcaatagccgggaatacaaccggagtaccgccgcccatggcaacgcctaattttacagcttctacgatcttgtccaggttcatatgtcccggaacgatctcattataagaacttacaataccaactaatggcttgttcatttcttcttctgtcataccaagtgcattaaaaagagaacggtgaggtgcctgctgcatcccttttcttactgcatcacttctcatattttttatcctcctgaaattctggcacattttccagttttcttttcaggaaaatatgcccttttctctgaatacttaattagtggatacgctctgcaaccagatcgcccatctgggtggttccaaccttggtgcatccatctgacataatgtcgccggtgcggtatccgtctgccagtacctgacgtacagctgcttctactgccagtgcctctttgtccagatcacaggaatagcgaagaagcattgctgcggaaagaatagttgctaatgggtttgcaatgccttttcctgcaatatccggtgcagaaccatggcttggctcatacagaccgaacttggactcatttaagcttgctgaagataacattccaatagaaccggtgatcatacttgcttcatcagaaaggatatcaccaaacatgttttcagtcaaaactacgtcaaactgtcccgggttcataaccagctgcattgcacagttatcaactaacatgtggcttacttctacttccggataatcctttgcaacttcatttacaaccttacgccataaacgggaagtgtctaacacatttgccttatcaacacttaccagctttttgcggcgcttcatagcgatctcaaaacctttgattgcaatacggcggatctcatgctcgctgtatggcatggagtctactgcgtacagttctccgtccttttcctcggtgcttcttgctccgaagtaaacaccgccggtcagttcacgcataatgaccatatcaaagccgtttccaatgatctctctctttaacgggcatgcatctgccagctgctcaaaaagataagctggacgaatatttgcaaacagattcaagcctttgcggatctttaaaagtcctgcttccggtcttaactcaggtgctacatcataccatctggagttgccaacatcaccgcctacagctcctaacagcactgcatctgaatttctggctgtttccagggcttcatctgtcagcggaacaccatatgcatcaatggagcagccgcccattaaaatatctgtataattgaacttatgtccgtaaacttctcctactttatctaatacctttttagcctctcttacgatctcagggccaataccatctcctggaattgcaacgatattataattcataattattatcccctctgtttattattccttttggttatacattatgtaataactgtaatttctatcaatcatatctcatttggggcttcatttcaactgttccaggtcattttccctatgacaaaatatacatgtttggaattgccggtataactttaaatcatatttctactggatctcacggatcaggcagtactgttttaaatcaaaatgcttctggacaatgccaaaaagtttaaagccgaaatgctcatacataggcacattatccggattatgagtctctaaggaaatcataagatgatgctcctgagcatagcggatcacctcttccataaggatggccgccagaccatgatgctgcatgtccgggtctactgccagatagatcacatgaagtctctcttcctggtgaagctggtcggtccaacgtgaatttaagtaatcacggcctctcataaaattccacaaggtcttaaggcttgggtcctctttgatcagatattcatctgttttcaagctggcccaggcttctgtcagataaaaggtaaggggattataaggctctgactcatccgataccaccaacagggaattcatttcctcgctgtcagaatagatctcacaggtttcaataaattccgtaagatcacacttaaaaagctccggcagcagccgctccctggtctctttttccggtatcagcttgcagtataaagggtcatgggcgaaacatttcaccaacagcttttccagttttggcaggtcttctttctttactctgtataacgtctgactttccatactatatgtctattctccttactgtttttgaacgcagccttccatggcagctaaaagcttctccacagaagatgccatataatcaatatcatcccggtagcactgctcctgggcatttgccgcctggagcaggatcttgtactcttcttccagatccggtctttctcctgctttctgcagtttattcttttcctttaagcttactaccagatcatacaggttttcgtggtggataatacggccatagccccattttaaccggtctgccggctggtttaatacatactctgtaaaataacggaatacttcccggtcaaacaggaaggcataccggttgttgtcgatctcataaacggcttccaaagcgccttccgggtcatcctcttttaagcagccgagagccttgtaaatgactttcaggttttcccctactccctgctgagggaacagtacatcatcatgccagtttaagcgtacaaaatagtcctgttcctttcggaagatataaaggagggagctgtttaaggctgcatattcggctgccatggcctttgcttcttcatattttcctgcttccagaaggtttttgtaagtttcattgatcttctggatctggtcgtataactgatgtcccagctcttttgcttttttcaggcgttctaaaaggttcgtttcatttgcctgtgttttttcgcacagtgctttttctacactgtcctccactgctgcaaacagccgttcaaaatccataggtactactgctgtatgatcaaatgccagcaccagttttccataaaggttgtgatggaagcggtaaaccggctcatcatagaaatcttcattgtcaaactgggaatgataatgggtctccataaactctccatcgctaaactcatttacagaggatggaatacctgcaatggcaatggaaaaatcatcggaccaggtctggatggggaagtggacttccaggccttccgggtatgcctctttagacggttggatatgttcggttgccttcttcataaaggaagcgtattcataggtacagcggactgcatccttctttccatgggcatgggccggaagctcgaagttaaagtctgcgatcacctttccctgccactccggatgggcggtaaatacctgttcgtaggcaccggtggaccagtcatatttggagtctaccacaccccactcttctgctgccatagcacagaatacaagagtttttcttggcttatatcccatatcgataaaggtccttgcaattccaagcatcatggcaacagctgcgttatcatcctggaaaccagtaaaataagagtcataatgggcagacagcatgatcatctgctccggctcttctcccgggatcataccggtaatgttataagactcccggtcacggatcactgtagactgggcatcaaataatacctggatctccttaaaatctcctgtataatttccagttttttccatatttcccatgtcttcttttaaaatagctgcatctgcctgggaaatggagaaagcagccgcttctttgggacctgcaatgtcctgggcatttaaggaagtatcatggatctccccatatccctgatcctggacagcgatcagcgcagctgctccctttaaatgagcctggtaaacagggaaattgatccaccattcttctctctggttgatatcgatgagcaccagtttgccttttacatctatattttcataattttccgctgtgccccgtcctaagtagaccatagaaaattcctgaaaaccttctgtatggaaatcggtctggtaggcacctaactgaaattcgtattcttttccttctttatcacggtaacgaaggactgcgtgatgaaagtcccagctgtccactttgatcttgtccttctgaacattctgaaggcccatttcctgcatttcttttaaaagtagttctcctgtctcccactctgctttagagccggctgtgcggtatccaagcaccggattggtctttggtccttccattctttttgcaagatcgtaagatttttttacatcaacagcctgttcaaaggcttcttcccattcccttaaactgttcattcttctgtcctctttcttctatgtactcttctaatctctgtatgagaacacatctatctcaaatgctgcatttataataacacaaaataagccgctgcaaaatgtctttttacactttgcagcggcttaaacttcttaataatatgttctaccgaaaacttactgggcgatccaagctccgtcttcacctaccagataattgtccggtgtcatgcagttggtgagcatatcaccgttttcagagcagtagtagctctttccttcccagtcgatccagccagtcttcatataaccgttttcatcaaagaagtaccactttccgcctaattcttcccacttatttgcaggataggtgccgtctgctctgcgataccaccatctttcatctgcttcctgtttccattcaccggtagtaccggaagctgtatttacattggatgcattgggatctgccttaaactgtgctactttttctccactgatataaacgctgtttgactcagtccagtcaccttttacagtaggatcgtatttattgaccgcacgtacctttaccatataggtttcatttggtttcatcatacgttccctgcagttagcggaattggtattggtctccaaagaagttcctacgatctttccttctctgtatacacgaacctcataacttcctgctgtactgatagccggccatgtagcaattccattatctgataaagtaattccttccatatctttcaagctgttctggagagaagaaagggtaacatccaacagcaaaacagagctggattgctgtctggtggactttttaaattccgcgccgccctttaatgtaactttatcctttgtaagggctgtaaaataataatcatcatctgctgtcagggtgatccggatctccggtgtcatatcttctgtccagtaaaatccttcatttaagatctcgtaaccatccacactatagcggttgctgctgctttcgatctcaatgatctcctgtccaaaatcagtctccggttcaatatccgctttaatgctcactgatacagatgtgatcttttttctgctggctgcataacctggaaaagcactcatcattgcaagtacgcctgccattgcagcagcgatcagtctttttttgctgtatgccatttttattcctcctttttctcacaaaccatctatgcatcaaaacaaatttctaatgcacacacctgttcaaacaggtttctctctactctaagggtatctgttttcccttatactgtcaataaagttttccttacgattttatcagaaagtttaaaggaaatgggattaaaaaaagctccatcgcaatgatgaagctttttcacatgatttttacttagcatagtccgttactctggattcacggatcacattgactttgatctgtcccggatattccagttcgtcttcaatacgtttggaaatatctcttgccagcaataccatatcgtcatcgctgacctgttcaggaataaccataatacggacttcccgtcctgcctgaatagcaaaagacttatctacgcccttgaaggaatttgtaatatcttcaagctgtttcaatctgtttgtatatgtttccagtgtttctcttcttgcaccaggtcttgcagcagagatcgtatctgcagcctgaacgatgcaggaaataagattggttggttctgtgtctccatggtgagactctacagcgttgataacaactgcagactccttgtactttctacaaagatctgcacccagctgtacatgagtaccttccatgtcatggtcaacagactttccaatatcatggagtaagccggcacgttttgccagacgtacatccacacccagctcagaagctaaaagccctgataactgtgctacttcgatcgaatgctttaatgcattctgaccatagcttgttctgaacttcatccgtcctaacagttttaccagttctggatggataccgtggataccaacttcgaggcaggcagcttcgccctcttccctcatattgttctccacttctttctgcgctttttctaccatctcttcgattcttgccggatggatacggccgtccacgatcagacgttccagtgcaattcttgctacttccctgcggatcggatcaaatccggataaaacaaccgcttcaggagtatcatcaatgatcagttccacacccgttaaagtctcaagagtacggatattacgtccctcacgaccaatgatgcgtcccttcatctcatcatttggaagctgtactacagatacagtcgtctcagccacatgatctgctgcacaccgctggatggcagttacaactaaatctctggctttcttatcagcttcttcttttgccttgttctcaagttctttgatcagctttgctgtatcatgctttacgtcttcttcaacagattttaaaagatattcttttgcctgttcggaggtaagaccggaaattcgttccagttcctgtattccctgctcatactgggcttccacctctgcggtacgttcaccgagaatgttttcccttctgaccagatcagcctccttcttttcaagggcatctgcctttttttcaacgttttcttctttgcttaatacacgcttctcgtaacgctgaagttctgctcttctttccttggtttctttttccaactcattttttgtctttaaagattcttccttggcttccaggagagcttctcgcttctttgtttctgcagtctttaatgcttcatctattatctctctggctttttcttctgcacttcctactttactgtcatactgcttgcgctcataggaacggcctgcagaatgtgcaataaaaccagcaataatagccgcgattaccgcgccgatcaaaacaggaattatgatctgcaacacaggagcacctccttatatttagttttcattgtacgaaatacaacatattaattttatacttttttcagaattgtgtcaagtatattcctcttattttcccgttgtaccgacaacataaacaaaagacagccgggtcttctttaataatctgccacatccctcaaaactcgactgatcacctcaaaggagaagcctttccgtcctaaaaaagctgccagcttctgtatctcttttttatcttccgggattcttcccccggtcttcttttttaaaagggcacggactgtttcttcctcgtctacaggattttcttctaacatctggcggatctgatcccggtctactcccttttgctgcagttcataggtgatctgtcgtttgctctttcttcctttatttacatggatataattttctgtataggcattgtcatcaataaagtgatattcctgaagaaatgaaagtacacgctccgtaactgactgtggataaccgtcatcttttaatttctttatcatctccgcctgtgtacggccctgtgactgaagaagatataatgcccggtccctggctcttttaagaagtatttcttcttcgatcatttcatatgtttttgcaggaagatcatttccctcttctatatgaaagcgggctgcttcgcttttatataaaacaaatgcaaagtctccctccaggaagactttgcattttctcttatctacaggcacaactgccttaacgatcattcttcttcagcctcaccagccatcagctcttcttctgtgccttccggaagaatggaaccggtcagttcttcctctttcttagctgcctctcttgcctgtgcctctgcttcttcagcacctggcagattgtactttacacgtacctgggcttcgatctcttcacagatcgcaggatgagaaagaaggtactgctttgcgttctcacgtccctgtccgatcttggagccatcataagcgaaccatgcaccgctcttttctacaatattctcttttacagcaagatctaagatatcgccttccttggaaattcccttaccgaacataatatcaaattctgcctctttaaatggcggagcgatcttattctttacaacctttacgcggacacggtttcctactacttcgccgccctgctttaatgtctcgatcctgcgcacatccatacggacggaagaatagaacttaagggcacgaccaccagtagtaacttccggatttccgaacataacgcctactttttcacgcagctggttgataaagataacgatacagttggacttgctgatgatggcagtcagttttcttaatgcctgggacatgagacgggcctgaagacctacgtgggagtcacccatctcaccatcgatctcagcttttggaaccagggctgctacagagtccacgatcacaatatctactgcaccggaacgtaccatagtctctgtgatctctaaagcctgttccccgttatccggctgtgaaatatacagatcatcaatatctacaccgatattctttgcatatacaggatctaaggcatgttctgcatcgataaagcctgcgataccgcctcttttctgtacctctgctaccatatgaagggcaacggtagtcttaccggaagactcaggaccgtacacttcaataatccttccctttggaacacctcccagtcctaatgcaatatcaagactgatggaaccggtaggaactgtttcaatattcatatttacaccggactcacctaatttcataacggagcccttgccgtatgccttttcaatctgagtcaaagcagcatctaatgcttttaacttttcctctttattcatatctctattcacgctcatcttttcttctttgcccatgttttcctgctactaaaaacatatacacctgtgtatatgctagatgatccgctacaatctcacgatttgtagttactgcttcaatgtgtatgctttggcggtcgcaagcaacacgctactcacaagttcttgtacactccacagtcgtaaattcccaactaagccattggtacatacctatcaattcatttcattgatagatataggtttcatctatatagcttttcctttcctagtttttatttgtttatcacttggtttttgtggattttaaaccattactcaattacagccaacaaggttctaccctatagttagcaagacatttcttaatacatcttcccgagaaaataaatgcgaacaagtgttctgtcgtgtaccataatcatagtacagttattaaaaattgtcaacctgcttttcgatttcttctttgtaatgtaatttcttctttgtaaagttactttgtaaatccttttggtaaaagcgggcgaatgcccctggaagggagtttttaatgtctttgcagtgtgaatacctgcgggagttggttttacaataacatatttattttctgtttgcaagatgcattaaaagggtttaaaaaggccgcagcccggaaaagatcccggaccacggctatatgaaaaaacaactgagcgaaataaaagaattgtataacaaaattactgtgcaataaagtcttccagagcctttgcatccagttctgctgctgcgtcagactgcatctgatcccataagccttctgccttaatatcagagaagaagccattgcaccagtttgcaaaatcttcatttccgtacgccatacacagaccacagcctttatcaaattcatccgttggttcccatgtaagcttatccactactaccagatcatcattagcagctacagacattgctgccgaaactgcattcatacaagccagatctgcttttccgttcttaacagccagaagcatgttcggagtattatctaattcctggatctcagcatctggatagagatattttgtcattgtaatatcaatggatcccatctgtcccgcaaccttaacaccttttaatgttccggtaaacatatcactgttttcattgtccttctttgcaacataacattcatcagatttatgatatacatctgtaaacagccaggtcttcttgcgctcatcagtaggagacagacgtgttacaaaatatacctggtttgcctgcagtgcggacatacagcctgtaaaatcactttcataaaaatcaactgtcacttcacgccccaggtaatcactgagacgttttgccatctcatacattccttctacttcaaatcccaccagctcatctttgccatctttaactgtgtggaaacagaatgtaggattatttccaatgattcccacttttaattttccgtttttgatgatatcttcaaagatcggaccatgctcctgttttgcaaattcttccggagaaacagaacctgaggaagctcctgatgtggtttcctgggctttttcttctgctgtagtctgtgcagcagtctctgcctgagtttccgcaggcgcagctgcagtcgtttccttggcaccgccagaacatgctgcaagagagagtgccatcatgcccgccatacagagagccgccatttttttcattttcctcatagtcatttcctccttaaataatatcttgtcataatattttctttatctttataacatcttgcttaaaaattccttcgtccttttatgctgtggatttgtgatcacatctttaggattaccttcctctacaatatatcctccatccataaataccagccggtcacctacttctctggcaaatcccatctcatgggtcactactaccatagtcatgccattttccgcaagctggcgcatgattttcaaaacttctcctaccatttccggatccagcgcagaagttgcttcatcaaaaaggataacttccggatccattgccagtgttcttgcaatggctactcgctgcttctggccaccggaaagtttggatggatacacatctgccttgctttccaggcctacctgctttaaaagctccatagcctttttttcagcttgttccttgggaattttttttacttttcgcagaccgatggtcacattgtccagtacacttaaattttcaaacagattaaatagctggaacaccattccaaatttttcacgatactcatctaacttcagatcttttcttaaaatagactgtccgtgaaacaggatatcaccgcctgtaggtgtttctaaaaggtttaagcagcgcagcaatgtggattttccggagccggacggaccgatcactaccactgcttcccctttcagaaccttcatatctacgccttttaacacttcaagacttccaaaatttttctttaatccttttacctggatcacggcttctctctgatcagtcatgtgcacgcagcctcctctccagtattcctaccagtttctttaagacataggtgatcacaaaataaataaaggcagttacgatcaacggctcaaatgccaggaacgtattagcacgtactgaatttgatgtataggtcagctcatgaagtgcaataacggatacaatggacgtatttttaataagaaggatgaattcattacacagggacgggagtacatttttaattgcctgtggaatgatgatataaaagttcgcctgtagtttggacattccaatacatctggcagcttccatctggcctttgtttaccgcctgcattccggctcttgtatgttctgcaatgtacacagaactattgactgtcaaagatacaactgccgcccagaactgtggaagcgacgttgcgatcccgtagtacacaatgaatatctgtaccataataggaacaccgcggataaaattaatccaccagtcaatgatcgtacttatgattttatagttctgcacacggatcatgcccatgatcacaccaactatactggaaaggatcaaagtccagaatgccagctgaagcgttacttttaagccgtccatataatagaaccaatattttgataaaaatgtaaaattcagtccaaagatcatattggtcactcctcgtataatatcttttagatacataaatacatatattttggttaataagttactaaataaatatttgttcaataggcttagtaaagcccat

SEQ ID NO: 3535 - DNA, 40804 bp, Unknown
  gut microbiota DNA sequence
agctgctaatccctttttttcaatcgttggaacagatttttggcaaatgccttcatattcattttttttatcaaactctgctccacttacatgatgtcctgatcgattgtagcaagtgatcttatgcccatcctgcgccattctggtgcaaagttcttttacaacaatttcaattccgccttctctgctcagtcttttttgaccaaacatagaaatagctaatttcttttccatatgatttaaagctttcctatttctttattttgaaaaatacgtgggaatttcttgttgagtagacatttctcagtgcgtaccaaaaacgcctcttttttcgggcttgcatatgacattttgattcatatacaagcccctatgtcttctcatttatccagtttggtgaacctcatgatcatctcatgaaatcacctcatatacagttgtttcatgatcctacatcgcaccgtcccgtttgaatacaaccagcacggttttgaaaaggatctttatatccagagcaaagttccactctgcaatgtactgcctgtcgagttttactacatcctcgaagtcagtgatattgcttcgtccgctgacctgccacattcctgtaatgccaggtttggtggcaaggcgggcacggtggtgaagatcatatttgtcccattcatctaccgtcggcggtcttgtgcctacaaggctcatgtcaccttttaatacgttaaagaactgtgggaattcatccaagctgaagtctcgaatgatatttccaattcctttctttattgtaccatccggaagtttcttggttccgatgattcgtggatcccattccagtttaaacatcataccgtcttttacacggttctgtttcatcagttctttcttccgctcttctgcatccatatacatactgcggaatttatagatcttaaatttctttccgttctttcccacacggacttgggaaaagaaaatcggtccgggagattgtatgtagatcaacggtcctaagatcacggtaaggatcaatgtgatcaggcaccctaccagtccgcctaaaatgtccagagcgcgtttcataaaaagctgcttggtagttacatagttgatactggttgtcagtactgtgtaaacacccagacgttctacaaatttcttttcgccgatcaggttggatgtctttgccagtttcatatgaacaaccgcgcccatttctgtcagctggtttaacagcatttccggatacggagcatcgtctggaagatttacaaatacttcatctacccattccctgcagacgtaatccgctactgtgtctgcatttgctacaactgtaatgctatctccacaatcatgccctaccatatcgcagtcgatcactgccacacctgcaacatgaaacatttcataattaaaattgcgaatattatagaccaccgtatccagcatgctttttgtagttatgatcaacagagaacgtttcatgctggaacgcatttttcttttcagctggtctttccacaagatacgggtcagataagaaacaagtaaatacagaaccgtcatataaagcaatgccagtctggaataatcctcgcttctttttatatagaaaagataaaacgtagttaccaggatcacatgttttactgtcattgcaaattcctgataatatccacgttttaacacatttttcaaagattcaaagagtaatagtacgccggcatcgatcacaactaagataaatgccacgttacagtatattaaatggctataggggttgctaaggccatttcttaacatataagccaataaaaatgcgatctgtaaactcagttggtcccagatcataaaatccagatgtttttcccatcctctggcgctttttcgatacatatccccacttcatcctttttcgtttgcgtttgtaacagagccggaaatgtctcccggctccatcataatagttgttattttacaagaacctgtacagtacaagaacctggtacttcaaaacttacatattttgtattccagttaatggtaggattcttaactgtaacccaattgctcgtattgttgtctaagtagataattacaatatctttgcctgcggttaaggtacttacatacagattaactgtagaacgaacatcatgtccatttttctgagagatgatcgcacgggttttacctacattagcatactcttccagacctgcattaggaacaagatcactagcctttttggttccgttatttaagccattaatctgacttacagattcatcaccaagtccggcagtttctgcttcaccagttgcaatactctgatcaacgtcactattggaagcatcttcaatcaatcccatagttacttcagaaccatcctttgtaacattggttacttcctgtctttcgttgtctcttccctggacaacagttgcttctgctactttgtttactcctgatcctgcattggactgctggctgccagtattagtattattctggctttggcttgatgaatcctgaccaatagttccatcagactgactaccaggacttgtaactgcaccagctactaccggcattgctaccatagctgcagccattgccatagctactaaagctttcttcttcatggttatcacgccttcctcccttttggggtaaaatatatttcaataagcagcgtgtttccacactggatattgtatagtaattattctgtttcccggtaaaacagatctaaaatgatctggatcgctgcctgacggtcagcacggtatacatcgtacttctctgttatctcttctactccgggaactgtgtaaaaatcttcgctggttaaactgccagcttccattccatccattgctatctttacatactgatccttggtcatatctgttaccatataatcctgaatcatgtcaaacagatgtaccacgatctggctgtctgtcttggatgcggcttttactgcctgaaaatactgcgtaatatattcctgctgctggtccatacggtacagtgcagtaaaatgataatccgtatcacggtaacgcacaaaggcttctgcctgatttccatggagagtgacctgattgcctttgacaaatgccggatcctttttctccattccctctgtagggaccgttactgtaacaccgcctacagcgtcatttaactgtgctactactgtggtatcaactgccatatactgatcaatagtaaatccgcaaagaagcttctgtacagattcaaccatattttcacagctgccttccctgccatcaccataagcatacgccatagtcagctgggtgatcttggtatcatgaagggttctttccttatttgtaataggaatttctgtcatggtatcacgtgggatcatcaggatctttaatgtatgtcgggcagtgtcctgggcgatcagaaagataccgtccgactgaccggccaagcccagctcctttgtctctgtcattgtatcacttctgtcaacacccatacagaggattgcctttacatactggtttcttctgtaattttttcctttataggtcaactgatcctgggctaagataggcaccagattcagatctcttggatctgctgtcaattcttctttttgccccggagcaattcctatttcttcttcagcagctgtctgagactctgcttcagctttctgtctttcttcattgcgtgcctgaatgatcagttctgttgcctgccggtttttgtacatagtcacgccgccccagatccccagggtcagtgaaacaagtcctataccgatcaaagcgctgtatatcttctttttcatatcaatcagcctgatttcctgtgtaactgttacttatcagttgtctgtgctgcttcagctttttcatatggactgtaggcaccgtatttatcatacttaccatatcggccatacttaccgtatttaccatattttccgtatctgccataataaccattctggctgaggtcaactttgtttaacacaacgcccagaacacggcagccggtcttgtccaactggctctttaccttctgttccagacggtagcttactgcaccctgttcaacaacgatgatcgcaccgtcacagttgctggctacaatagcactatcgatcaggtttgccataggcggtgtatcgatgatcacatagtcgtaatctttcaaagactggatcagatcatggaacagatcttcttccagaagctctgccgggtttggtgaatatggtccggcaaaaataacgctgaaaccttcatagtttgtttcgtaaataatgtcttctctgtttttctgaccactgaggtactgggaaagaccgtttacctcaccttccagctgataacgggataccagaacagatttacggatatctgcatcaatgaagattacctttttaccgatctgtgcaaatgatgttgctacagaaaaggcaatatcactttttccttcatctggaagtgcgctggtaaacataatggtgcggatgttgcttccgcagaactggatattggtacgcagggtcttaagagattctctatagttataatcatcttttatttcgcgttttaaagaaattactttgttattcatttacgatctccctgctttccttttttcttatcgtctttgttatgcatatgagaacgtctgagtgtctgttcattcttattctcttctgcttcaccttcacgaagaggtacagatgcaagaacagtcagtcccatatatttctctacatcttcttctgtctgaatggtatcatttaacagctcttctacaactgtcagaccacataccagaacaattcctaacatagctccgatcatggcattcttgccattgcttgggcttgcctttttatcagatacagtaccttcctcaattactttaggaggaaccatttccataatgtctccgatatactcggaagaagtctttgcaacggagtctgcaatatcctttgccatcaccggatctggatcctgagcagtgatagaaagaattcgggtatcatttgggttattaatagtgatcttgctgaccatattttcgtaactgatatccagtttcagtttatcaatgacttctgaaataaccggacggctggttacgatgatcttgtagtcctgagtcagctggcttcctatctgcaggtcagctaaagatgtcagtgtagtttcttttgaaagaatatataccattgaagtcgaggtatactgcggggtaatagcaaacttgctgaacaggccgaaggcgccccccatgatcacgcctgcgccaacgatccagagaattctcttctttaatgcgcggaacagctggagaagatcgatctctacttcgtcatcattcatgttgattgtcttgttatccatacgtactttttccttttcttcctattattatatagtttctttttttatgacgcgcaacgcgttctggtaagtaatgcaccagatctgttgtgcatcaatatgaccgtcaagccatttgagtgcctctgtgatttgaggcggtctgtaatctgacctgtgcatgtctgtccccaggaaatggatcactcctgattttacctgttccctgcaccaccgtacctccggtgagaaccagtgtccctggatactgtcgtaattcatctgaagtttacatccaatatcaaggagctctgaagttcctttttttcgcaggcaaccgtaacgctccatatgagcaagaataggcgtgtacccgttagagaccagtttgcggatcccctgaaaaagaatttcataagaaacagaaggcataaattctaccagaacatattggctgtctgccatggtatatgccttcccctcattcaggcgctgtgcaagctcatcgtgataaaatgtttcctggcccggaaagatcctgaacttaggataggttttccgaatttcctgctgaagaagctttgctgagtcatttaatcctttcagcacatggcgtctggaatagtgaggtgtagcgatcacacctacaatcccctggtcggccgcccgtttcagcatttcaacggattcttccattgtccttgatccatcatccacacccggtatcacatgtgcatgaacatctattattcgctgccgaactttcatttttattagtacctttcttccggaatattctcaatgggttttaatgcagaaataagaagtgtcaatttttaagaataccacccccccagctaaatactatatagtttccgcttcggcacgccgggactgcctaaaaggggattttttctatgaatgattttacatcatattctttataaaagaaaggtcatttttgttttttatgaaaaataaggccaaagttattgtttgtaacctttgccttagtgaattacttcctattatatagtgttacactgcgttatttcagttacaaagccaattgatttgccaggatcacactggctgccaggctgacaaacgctgctaaaagtccgcctgcaagtgtataacgggtacggctgatgcctgcagaaccgaaatagacactcatacagtaaagcacggtttccgtacttcccataagaatagatgccataagccccacctgggagtcgggaccataatttttaaacagatccagcaccaggcctactgcggcagagttggaaacgagacgtataaaagcaatggggataatggggccggggagaccgatggaagtagccggaacttctaaaatatgggttaaaaattctaaaaatcccgatgcacgaaggacgcctaccgctgtcattaatccaactaatgaaggaaggacctggacaacggtctgcatcccctcttttgcgccatataaaaaatcatcaaataccggtctttttccaagtatggcgaaaccaacaatataaaaaatgatcagtggaaccataaaatctgataaaaataagagaaagcccataaaaaatgcctgcccccacgcatgttttgtttttacaacatacgtaggaacaggcttaattatgtaacaaatatatcccccgcgcaagcgcaggggatataagtaggaagtatgcattttgcgaatatacgatccagattatgcctcagtaaataatggagtggagtaatatctgtcgccgctgtccggaagaagagctacaatggtctttccttcgttttcaggacgttttgcaagctggatcgctgcgtataatgctgcaccggaagaaataccggttaagataccttctgtttttgcaagaagtttggatgcttcaaacggatgctcgttgtcgatgggcattacttcgtcataaaccttggtgtctaatacttttggaacgaagccggcgccaattccctggatcttgtgggcaccgccgtgtccttcagacagtacaggagaagttgcaggctctactgctactacctttacatttgggttctgctcttttaagtatgtgccaacgccggtaatggtaccgccggtacctacgccagctacgaagaagtctacctgaccctctgcatctctccagatttcaggacctgtggtctctttgtggatctttgggtttacagggtttacaaactggcctgggataaagctgtccgggatctcttttgccagctcatctgcttttgcgatagctccgctcattcccttatcaccaggtgtgagaacgatttcagctccataggcctttaagatgttgcggcgctctacgctcatggtctcaggcatggtcaggatcacacggtagcccttggatgctgctacagatgcaagtccgatacctgtatttccggaagttggttcaatgataaccgaacctggctttaaaacgcctcttgcttctgcatcttcgatcatcgcttttcctacacggtcttttacacttcctgccgggttaaagtattccagcttcagtaaaatccttgcctttaatccttcttttttctccagatttaccggttctaaaagtggtgtgtttcctactaatcctgctgctcccttaacgattcctgccataataagctcctttccatgcattgtatgataccagatccttcaccttttgatcctggtcccatatgcctatctgtttactgggttttgatttatgggtattataaaacctataaacccacttgtcaataggtttataggttttttgtattgctgaccatagctccgctggcatccatataataccaggtatctcccacctgtacccagccggtctgttttacataatctttcatgtaataccattttccgccgatcttcttccagctgtttgcaggtatcttttcactgtaatcggtaaatgaaagttcaatggtcacatgatcattgatcccgtctacatttccttcctgtgtacactgccagatggtacggtttggatagctgttaatggtaccatagcgggcgtaccagatatcgtatgggatttctgctgtatttaagtgattagtgagccagtcattatttgcatatacgatgggacagtaacctgcatctgcgatcactttacagaaggcattgacattttccgtgatctgggcggtacttaagccctgttccagcaggtaattggactccacatcataggcaaccggatatgacaccggaaaatccttgataacctggagcacatattctgcttcgtctgctgccgtctgtgcatccaacgcctgtgtatagaagaaaacacctgtttttataccatgagctgctgcttccgttatattccggtcaaaatacggatctttatccttataataaccaatacggatcatggcaaaaccgacgccatctgcagctacttttccccagtcaatgccattttcccggtttgcacggttctgatattttgtcacggtgataccttttgccactgccccttcaatgggagtgccggaagcatctacataactgccattttcaaagtcccatgcttttgcctgggctgccataggaaaagccagcgaaactgcaagcatagctgccgctaattttaaagatctcttatattttatatgccagatcttattcccgttctttctcatttattattttcttcctttctctgctttgcatttttaagttttactctcattctttgattataacattatcccattataaaaatattaacttttgtcgaagaaagtctaaaaattctcctaccattcttctaaacagtcagctataataaatacagttatgcaacacgggagattttttatgtctaaagtttgggaatttttcgaaaatatgaatgaggctgtttatgcctctgatgtggatacatacgaactgctctatttgaataaagcggccagagatctgtttcagtttaaggatgagtctgattataaaggaaaaaactgctatgagatcctgcagcaatgttcttccccctgtgccatgtgcaccaacaaccgcttaaaacccggtgtgttttatgaatggtcccgttttaacccgctggtgcgccgttcttatctgctgaaagacaccatggtaattgacgatggacgcagagtccgtattgaaatggcaattgacctggatattcatgaactggctaaacgttctttttctgaatttacagacaatgaagcactgatcaatgagggacttcgctgtgcactggcagaagaaacaccggaacagtctattgatacattattacagtatctggggcagatgttccaaagtgaccgtgtttatatttttgagaaaaataaacatggcaattttgacaatacttatgaatggtgtgcttctaaggtttcccctcagaaaaatattttacgcaatatcccgccggaaaccatgggtacctggattcctaccttccagaaaggtgaaagtattatcatccggaatgtgaatgagatcgtatcttatgaccccactgtatatgaaacactgataccgcaaaacattgcgcgccttattgtcagccctatttgccgtgaccgggaagtaatcggtttctatggtattgacaatccgccacttgaccgtatggatcatattgcttttatgctccagctccttggacattttatcaattccatgctgcggcgcagagacctggttgggaaactggaaacattaagctaccatgaccagcttaccggtgcgaaaaaccgtcatgccatgaacgaaaagctggcttctcttgcaaacggtggaagtcttggcattatttacagtgatgtaatgggcttaaagcagatcaacgatgattttggacaccaggcgggtgatgaggcgttgatctatgcctgtgaaaatttaaaggctcattttccggataaatgtgtttaccgtattggcggtgatgaatttctggtactgataccgggtattacagaaaatctttttcagtctatgatccgttctatgttagttgacatggctaaaagttcggttcacctggcacttggttctgtctgggtggatgactgcaccggaaaagtagaaaaatcgctgtctgaggcagatgccagaatgtatgaagataaacgtgcttattatgccaagaaccggcagttagaccgaaggagacactgatcatggtgtctccttttttattaggatatacccgaaatgaggtgagcattttggggaagatctatgtggggttacggagatgatccatgatcttacagaaaatgaccgctgccagtgtacttaccattgttgctgcaaaacagggaccggtgacggctgccggggatgtactgtgatactggcttctgtatgcaatgatattcaccgggatcagctgaagggatgaaatattcatgatcagaaaggtacacatttcattactggcagtgcctttcgagactgcgtgaattgtccttttcgccactttctcttttctgcgctcttcttctaccttttccagttctttcatggcttttaagcctgcaggtgtcgccgcccagccaagtcccaggatatttgcaatgaaatttacacagatctgtctggcggcttcacagtctgacggcagatccggaaagaggaatttcaaagccggtctcattttctctgaaagctgttctaccagcccggctctgcttccgatctctaagatcccgttccagaaaactacgatccccagcatggtgatactcaaggtcacggcttcccctgctgcgtttaaggctccttctgttacctgagccagccttccgtgaaacgcgccccatatgatccccagaaaaagcattccgctccagatataatttaacatattcctttttcctgtattgcctatacgcccatttatacacattttatgctctttcacacagagaaatacacattcttatggtggaaaaagttatccacaatctaaatcttgtatttcctcttctttttaccacatatcttgtgtttgtcggtggataatgtggataactttggggataactctgtttatagtgtgtgtaaagcatggggaaactgtggggaaatatggatttttatgtggaaaccggaaattttgtggattttttatccacattttggcagattttgcggtttccttttgggcttttccttgttttttcctgctttttcttgttttgccgttttactgtttttattttaccggcatatacagttccaggaaataaatgttgctgtcttctcctaaaaacgaagtcatattattggaatacagaactcctgttggctctgctccctgttcctttccccagcggaccatctggcaggctgtttcttcatcgggataaatattttcagactccaggatcgtataaatacagggaacgggtgcagtctgcggatattgttccagatggaagtcactgctgataaagggacctacttcctgatacagaaacagcttggtgccctgctcctgcatctgcccttcttttatggaaaattcggtatagaaataagtcatgtccaacccgcctgtttcagatgacagggaaaaccatttttgcagacttgcgtggagactgtcgcaaactcctaactgataggctaccggaaaatttttccaggtacattttccaccgtattgctctgccatttgaatatcttttgtggcaagccgcatacgggcaatggcctgctgatgatagtggatcttcatctcttcctgttttatacgggtctgcagatgttttttcatatattctacagaattctcgccttttatgtatccttcgatttcttccaggctgtcattcatttttctcttatataggataaccatcagtctgaacaggtcttcttccagataataacggtatccgttttccttttttctcgcctttatgatcccttttttttcataaaaacggagagtatcccggcttacgcccacaatttcggacatatcgcctatgagatactctcgctgttttatttccgttctgttttctgccatgcctttccagtctcctgttttcccattttctcacgatcaacatttcttccgaatgtgtttatgaatgttatcttatccggattttgcgagctggtcaatgggacgcagaaaatcgaaaggaaactgtaaagttttatctggatatttatcttactccaaatttggttccccgtttgatgataccgttgctgttccattcattgtaaacatatggtccgccatctgtggtaccgttttctgtaaattcatgagttccgccattatagctgtagttgcccgttaccattttgcaggtactggtatcaaaataataaacatttccgttgatcttcataataccaccctgaagttctccggtatcagccgcataataccaggtgccgtccttctggatccaaccggttctcattaactggtcatcgccaaaataaaaccagtgatttttatactgtacccagttattggtgcagtaagctccatcaccccactgatactttacgccttttcctgtacctgtaaaacctgctgcaaaagatgtcatagcgcttcctgccgtcagagccagcgcaagtactgtaatagcaaaacgtttcttcataattaaatgcctcctgcgtttttatatatgacaacgtccccctcatggaacatgtccttttgttttatgcagaaagcatacaccttgaagttactccaaggtcaaggcaagtaaggattttgtaagggtttgtaagaaaaaacggccatacctttttatgggtatgaccggtatttttggggggactcgcgaactcgtaccaacatgcttatctgtctgcttacgcaggcggttcatgcgttacaattctcccaccagttctttcatcacatcatctactttttcaatcttttcggctctgtaagcgttgctgccgcagaagagaagggcgttgtcttcgtctccttctgctgcatttaccaatgcctttgtgatgcagtaaggaatggttttgatatcgcagtgttccagacactggaagcaggttttgatggccggacggacgccgtctttgatctgctgtaaaaacggatttaagatggcacgtcctggcattcctaccgggctctgggtgataacgatatcttctttttttgcgttgatgtaagcctgtttgtaagcatccggagcgtcacattcttctgtcgtgacaaaacgagttgccacctgtacgccttctgcccccagttcaaactggtgttttacatcttcatgggtataaattcccccggcagttactaccgggatatgtttctggtatttttcttcgtaagtctttaccacttccataatggagcggacttctttatcgtaggcttcctggttataggtatttggcacatctttggtgtctgcgccgtactcagccagttcttctctggaaaagcccagatgaccaccggctaaaggtccttctactactacaaaatcaggaacctgcttgtattttctgtcccaaagtctgcagataacctgtgcagactttgcggaagatacgatgggggcaagctttactttttttactgcctgcttgcaaaattcttcgcagttttcttttgcatctgcaataccggctttcatctcttcgtaagcagcctgtgcatattccggaagacgtaccggaagacctgcgccggatacaatggcatctgcgccggatttaatggcttccttgacccacaggtcatagtgcttggtggctaccataatattaaaaccgatagctccttttggcgcaatctctctggctttctgcatctcccgcctgatagcgcgcagatttgcctctacaaagttggtcttaaaatcaggttccctaaaaccgatctgtgctgtggaaatcagtcccatgccgccggaagctgctacagctcccgccagtttatgaaggctgatgcctacgcccataccgccctggatcactggtctttgcagtaccagatctcctatttttaaagctttgatcccactcattacattctcctaaatctttcgtatctgtgctctgccagctcttcccctgacatatcctgatactttttcataaatccgatcatagaccggtccatatagcctgcgatgcggtacagtgtatctgtatttgccggttcttcctccggtatgatccgctcgatcagtcccagttcctttaaatcagcagcggtcactttcatgactctggctgcttccggcgcctttttactgtccttataaaggatagacgcaaagccttccggtgataaaatggaataaatggcattttccatcatccatacttcgtttgctactgccatagccagcgcaccgccgcttccgccttcgccgatgacgatagaaagcaccggtacttttaaatccgacatttcaaacagatttcttgcaatggcttctccctgacctctttcctctgcttccaggccgcagaaagctcccggtgtgtctacaaagcagataatggggcgtccgaaggtttctgcctgcttcattaagcgcagcgccttgcggtagccgtctggagacggcataccgaagttgcgacggatattgtctttggtgttctttcccttctgctgtccgatgacagtcaccggcatgccgtggaacatggcaataccgccaataatggctccgtcatctttaaagcagcggtctccatggaattccataaattcatcaaaaacagcgttgatatagtcaagagcggtgggtctgtctgcctttctggaaagaaggactgtatcccaagcactcttttctgtgttttcctgagactgtggagctgccagggtatttacaggtatatctgtcttaaccccgttctcttccacatccatatcatgttttctatgcatgtaaaggatccgtccgatcacatgcttctggtcctgacgtggaaggatcatgtctacaaagccatggtctaacaggaattccgctctctggaagccttccggcagcttctgtccaatggtctgttcaatgactcttgggcctgcaaagccgatcaatgcccctggttccgcaatgatgatatcgcctaacattgcaaaacttgcagttactccgccggttgttggatctgtaagaacgctgataaacagctgtcctgcttcatggtgacgctttaaggctgcggaagtctttgccatctgcatcaaggaaacaatgccttcctgcattctggcaccgccggagcaggcaaacaggatcaccggaagtttttctttggtagcacgttctactgcctcagtgatcttctccccaactacatggcccatactgctcatgataaagcgggcgtcacagacacctacaacagcaggatttccgtcgatctttgcctttccaataacaatggcttcattcagatttgttttttctctggctgcttctacctttttttcgtaatttggaaaatccagaggattggaaaatggcatttctttattccattcctcaaaagttcctacatcggtaagcatttcgatcctgcggtaagcatgaacacggaagtagccgccgcatttggggcatacatagtaattgttctttacgtcttccacatagatcggctgcccgcatttattacatttgcgccataagccttccgggatggatggttcttctccttcatggcttaccggtctgtatttggtatctatttttgtatacgtttttctgaacatgttgcgcagcatacgacaacttcctttctgcattatccttattcaggatcataaatatccgtccgggacctggtcgcggaggattttccagattaaaatcattttatgtagtccgggaaatacttttcaataaatccggtgtctgtatcacccttctgaaaagcctcattttccaggatctcatactgaaaatcaatatttgtttcaatgccttctatgatgacctcgcctaaagcactgcgcatttttgcaatggcagatgccctgtctttatcgtaaacgatcagtttcataagcatggagtcatagttagcaggtactttataatcattgtaaatgtgtgtatccacgcggacaccatttccaccaggaatatgcacgttggtaatgcggcccggacatggcataaagtgctttttcgggttttccgcattaatacgacattcaatggcatgtcccttgatctggatgtcttcctgtgacacacttaatggctctcctgcggcaacacggatctgctctttgatcagatcgatgccggaaaccatctctgttacaggatgctctacctggatacgggtgttcatttccataaaatagaaatttttgtctttatccaacaaaaactcaatggttcctgcattttcgtaattcacggctttggctgcctttactgcaacttcacccatttttttacgaagttcaggggaaatgacctcacaaggggactcttccattaccttctgatgacggcgctggatggagcagtcacgttctcccaagtgaacaacatgaccaaacttgtcacccatgatctgaaattccacatgacgtggtttttcaatatatttttcaatatacatggtatcatcggaaaatccctttacagactctaactgagctgcattaaaatgctctgtaaagtcctcttcgcttctggaaatacgcattccctttccgccgccgccggaagaagccttgatcatgaccggaaaaccgatctcttttgccatggcaagtccatcttctgctgtgtatacaggctctttgcttccaggaacaacaggaactccggcctgcatcatggtatttctggcttctgacttatttcccatgcggttgatgatctcagcagacggtccgataaaggtaatgttgcactgctggcaaagttttgcaaaacgggcattttctgataaaaatccaaatcccggatgaatggcatctgccttcattgcaacagttgcggagagaatacgctccatattcagatagctctggctggaaggagccgggccgatacagatggcttcatctgccagaagagtgtgcagacaatccttatcagcctcagagtaaaccgcaacggtgcggatgcccatttcacggcaggctctgatgatgcggactgcgatctcacctctgtttgcgatcaatatcttattaaacatttcaaatctcctatggaccagtattatctatccgatcataaaggtcagttcgccaacaactgcgatcttgccgtctaccgtagcagttgcttttcctacgccaaccggtcccttctgcttgatgatctcacattccagtcttaaacggtctcccggaactactttgtgcttgaattttacgttatttaagccgccaaaatatgcagtctttcccttgaaattctcctgggaaagaatcgctacagcgccggtctgagccagtgcttccacgatcagaacgcccggcataaccggttcctgcgggaaatggcctctgaaatatggctcatcataagtaacagatttgtagccaactgcctttacgcccggctctaattcttcaatacagtctaccaggagaaatggatgtctgtgcggaatgatctcctggatttctttaatacccattaacatggttgttgccctcctattttctctcggaaccaatgttctcccggaaccttttttatttggaaaggttccaggaggacatcttatttaatacggaataatggctgtccgtactctactacttcctcattatttacaaggatcgcttcaataacgccgtcatattcgctttcgatctcgttcatcagcttcatagcttcaataatgccaagtacctgtccctttttcacagtatctccctcttttacgaagctttctgcatccggggaagaagaactgtagaaggttcctactaatggggaggtgatcactttatcagaagcaatgtcatggctttctgctgcttccggtgcagctgcaggtgcttctgtgcttactcctgcggaagctgcagtgactacaggtgctgcacttggagccggaactgctgctacagcgccaggtgcgccaacggtgatgatctttgcttcttctttctctttcttaagggaaatatgcatatcgccctggtccagtttaaagctggtcagctttgaatcagatacagcctgaaccagtgtcaggatttcatccatattcatgtccacgttctccttccttatgcagtgaatttcttcacgatcaggctggcattatgtccgccaaagcctaaagagttgctgatggcataatttacatccatagatacgccctcatgcatggtgtaatctaagtcgcagccttcacctggattttccagacctaccgttggatgtacatagccgtcttcaatgctctttacacaggtaatgaactctacaccgcctgctgcgcctaataagtggccgatcatggacttggtggagttgatctttactttatttgcatgatcgcctaaagccagtttaatagcctttgtctcgaataagtcattgtgatgggtgctggttccatgagcatttacataatcaagctgctctggggtaattcctgcatccttcatggcaaattccattgcctttgcagcgccgcttccatcttctgcaggggaagtaatgtggtatgcgtcacaggttgcaccgtacccaactacttctgccaggatcttagcccctcttgcctgtgcgtgctctaaggactctaatacaacgataccggcgccttcgcccataacgaaaccatttctgtcctggtcaaatgggatagatgctttctttacatcatcggtggtgtttaatgcagttaaggaggtaaagccagccacaccaattggagtaatacttgcttctgtaccgcctgctaccattacatctgcctcaccatgctggatggaacggaatgcttcgccgatggaatgggtaccagttgcacatgcagttactacattgatgcattttcccttaagaccaaactggatagaaacatttcctgctgccatgttgctgatcattaaaggtactaataatggctctactctgccaggccctttttctaacagtctcttttcattacgctctaacgcctgtaaagaaccgataccggatcctacgcttacgccaacacggaaaggatcttctttttccatgtcaatgcctgatgtttccagagcttcctttgctgctgccactgcgaactggcagaaaggctccatacggcgtgcagtctttggatccatatactgctttggatcaaaatcttttacttctgcagccagtttgcacttaaaatcagctgtatcaaaatgagtgatcggtgcaatgcctactgtatttgacttgactgcagtccaaaaagcctctacactatttccaattggggtaatagcgcccatacctgttactactactcttgtattcatatatttgactcctgttctatttttgcctgattggcggtgtaacgaaacagcgaaagctgttttactacatagccatgcctccatcaacagatattacctgaccggtaatatagcgtgcttcctcagatgctaaaaatgcaactgcatttgcaatatcttccgtctcaccaaaagccttcataggaatattttccatgattgctttcttgatatcatcctttaatacatcggtcatttctgtcttaataaatcctggtgcaactgcatttacagtaataccgcggcttgccagctcttttgctgcactcttggtcagtccgatgacgccggccttagctgcacagtaatttgcctgtcctgcatttcctaatacaccggatacagaagaaatgttgatgatgcggccgctcttctgctttaacatctgtcttgcaatgtgacgggtgcagttgaacacgccctttaagttggtctggatcactgcgtcaaagtcttcctcagacattttcattaacaggttgtctcttgtgatacctgcgttatttaccaggatatccagacgtccatgctctttcactactgcatctaacatttccttgcagctttcaaagtcggaaacattgcactgaactgcctgtccgtttcctccggctgcctggatttcttttactacttcctctgcctttgcagcagaaccattataatttacgatcacaaatgcgccttttgccgctaatgttttagcgatctggcgtccaattccgcggcttgcgccagtaaccagtgcaatctttccttccagcatgtttattctccttctacgcctcttttaaagcttctactaccttttctatatcctctaacttctcaacgtttaatgtttttacgctgcggtcgatctttctcataaagccagccagtgtctttcctggtccgatctcaatgaaagtatccacaccgtctgccagcatggtttccacacactgctgccattttacagaagaagaaacctgctttactaaaagatcttttacaggttctgcctctgttacatactgggcagtcacattagctgcatatgggataaccggcttgtggatctctacgttttcaagaacctttcccagcttctcgcctgcgccaactaacattcctgaatggaatgggccgcttacatttaacataatggcacgttttgcacctgctgcctttaacttctcacaggcttcttctactgctgctttcttaccggaaataacgatctgtcccggacagttgtaattggcgatccatacaccgtctatatcagcagttacttcttcaatcactgctgcatctaatgccaggatggctgccatagcgccttctccggcaggaacttcttcctgcatgaagatgcctctctgacgtaccgttgtaatggcatcttcttcgctcataacccttgctgctgccagtgcacagtactcgccaaggcttaaaccagctgctacgtctggttttacgccattttcttctaaaaccttcatcatggcaatgctggtggtgaccatagctgcctgtgtatattctgtaatatccagtctgtcattcggctcaaagcaaagctccggaacagagaagcctaaaagctctgtggctttgtcaaataccttgcggcctgtttctgtctgctcataaaaatcttttcccataccgcaggtctgtgcgccctgacctgggaagataaatgcgatcttactcatgttcattactccctgtttaaaagcggttcaaaaagtacctaacaacgacctaaaagtttctctgtttgatccatcatctcttcgatcatttccttacaggtctgctctttggaaataagacctgcgatctgaccagccataacggttccgttctttacatcgccttcctgaactgccttgcgtaaagttcctaaagtcaggtattccagttcctcaaaggactttccttcctgctctaatttgatgtattctctggtcatctggtttctcaggcagcgtaccggatgtccatgggttcttcctgtaacagtggagtcgatatcttttgccttgatgatacgctccttgtaattttcatgtacaatagactctttggaaacaacgaagcgggtaccgatctgtactgcctctgcacctaacataaatgcagctgcaatgcctcttccgtcaccaataccgcctgctgcgatcaccgggatagaaacagcgtcagcaacctgtggtactaaagtcatggtagtctcttcgccgatatgtccgccggactccattccctctgcaacaacagcgtcagctccatatttttccatacggcgtgccagagcaacagatgcaacaactggaatgaccttaacgcctgcggccttccacatatccatatatttttcagggtttccggcacctgtggtaactaccttgatgccttcttctacaactacttttgctacgtcatctgcatgtgggcttaacagcataacattgacaccaaaaggcttctttgtcagctctcttgcctttctgatctcttctctgactacttcgccaggagcgtttgcgccgccgatcagtcccagaccgcctgcctcagatacggctgcagccaggttgtgctctgccacccatgccattcctccctgaatgatgggatattcgattcctaacatttctgtaattcttgtattcattctttcctccaaaattccgggattttcccgtagccttgtagaaacagcgtgcttccatagtaagcacgccgtccccctgttgctattgatgtacactccgctttttcgcggagcagctgactttcattgccgccgcctggcagcatgtctacttataattaagcctcaacgcctttgttctttaagtagttcataacatcgcctacagttgccaggttctctaagtcctctgcagggatctctacggaatactcatcctctaaagccataaccagctcgaacagatccagggagtctgctcctaaatcgtccttaaaagaggaagcctctgtgatgctgtctgcatctacgcttaactgatctgcaataagttctttcatcttctctaacatgatattgttctcctttttctgattaaaatttatatttttatttaacttatccgctgcggcaaagccactgcgtgtatattacgttatttattactgtctgtttaccactccagtaaaacagctccccaggtaagacctgcgccaaatccggctaacaccagcttgtctccgtttttaagctttccggctctgtttaactcgtccagtaaaataggtacggacgcgccggatgtatttccatagtgttccatgttcaccgggaatttctccagatccactttcaggcgttttgcaatggactcaatgatgcggtaatttgcctggtggatgatgaactggtcaatatcttctgctgtatttccggtttcttccaaaacttctttgatacactctggaacctgctttacagcaaatttgaacacttcctgtccttccatggtcatgtagccaagctccggtttctttcctaataagaagtttcccgtagaacggcttccacaggtcagtaccccgcctttggctccgttggaatgcatgttcagaccgatgataccattttcagctgctgttaccactgctgctcctgctccgtctccaaagagaacgcaggtgcttctgtctgtccagtctactaacttgcttaacaggtcagcgccgatcacaagggctgttttataaagaccggaagaaatataggcatgtgcagtgcttaaggcaaacacgaaaccagtacatgcagaactgatatcaaagcaggctgcattcactgcgccaactttcgcctgtacctcgcaggctccatttgggaagcagtaatccggtgatgaagtagccaggatgatcaggtcgatctcctccggatcaattcccgcctgctcaatggctctcgcagctgctttcgccgccatatctgatgtactgtcgtctgttgcgatccttctctctccgatccccgtgcggctgcggatccactggtcattggtttcgacgatctttgacaggtcatcatttgttacgatctgagccggtacataggaaccagttcctataatttttgtagtcatttttcttacctttccgcagaaatactttgaacttcaaagtaatactacaggaatagataacttttgtcaagaaatatttttttaatatctaatcaactgttttttcgtttctgttcagtattttcctgtattcttttataatcccccctttatcattgacttaatttccaaaatttgctactttttaactatacattgtaaacaatgcatgatgtcccttaagttagggatcgcagcggtatggggttcgcaaagtacaacaaaacaggaggtatttcattatgaaaacaacaggggttataagaaaactggacgagcttggacggatcactcttcctatcgagctgagaagaagcctgaacctggacgtaaaagacgcccttgagatcacagtccaggatgactgcatcatcctaaaaaaagcagcaaacacagatatcttcaccggggggacagaagatctggttgaatatgaaggaaagaaagtttctaaggcatccattctggcgctggcaaagctggctggtttgaagttagctgagtaaattacatagaaacaattaaaactgccgcaagaccatgaaatccgtggtcttacggcagtttttttaattacttctaaattcattacacaaaacatgagcgaatatttcagcatcacgcacattttattacagcagctgctgatacacatctctcttagatattcctctgtcctttgcaactgccttcatggcttcttttttatccattccctgtgacagataatgctccatatgctcttcaataggcatctcttcccaggcgcggatctcttcttcacggatctcttctaccggctttccagcaatgacgatgacacactcaccctttggttcttctgtttcgtagtgggccagtgcttcttcaaaggtagtctggaaggcactttcaaacttcttggtaagttctctgcagatggtgatcttccggtttcccagtgccccgtacaggtcctctaaagttgccaccagatgatgaggcgcttcatagacgatcatggtcctggtctcttttttcagttcttccaggatccgctggcgctcttttttatcacttttttctgctggcagaaatgcctcaaagcagaaccttctggtaggaagcccggacatggtaagggcggtgatacaggctgcaggtcctggaagagaagtgaccggaatacctgcttcatagcactgtcttaccagttcttctcccggatcagaaattcccggtgttcccgcgtcggtgatcagggcaatgttggtgccctctgccattttttctaccagatattttgccttttccaccttattatactcatgataactggtcataggcgtttttatgtcaaaatgatttaacagcttgatactgtgtcttgtatcttccgctgcgatcagatctgcctcttttaatgtttttaacacccggtaggtaatgtcttccagattaccgatgggtgttgcacacagatataattttcctgtcatgtacctttcctccgcaagcgctttttaatacccgtaagtagtccgtatctcctgtgaatactccccgttctcatcaaatacaataaccggcgcttctaccttcatcagggctccgccgcctcttactgcctcaatcagcaccatattggctttccggtccttataaggatgtacaaatttcatccgtttaggctctaaaccatactgcttcatagtctgtaagatctcgatcagccttcttgggcggtggaccatataaaaccggccccctggttttaacactcttgtgccttctcttaccacatcatctaaggtgcaaagcacctcatgacgggcaatggccttggcatctcccgggtttttaatgccgtgggcatcattcatataaggtggattgctggtgactacatcaaaagaagccagtgcaaacctgcttccggcctccttgatatctcctgttacgatctccaccttttcttccaggtgattgtatttcacacttctcctggccatatccgcagactcttcctggatctcaaggccggtaaagtgccttccttctgtttttgcttctaaaagaatggggataataccggttcctgttcccagatccagcgccttttctcccggctttaccactgcaaaaccggacagcagcaccgcatccatcccaaaacagaaggtgccttttctctggatgatgccgtaatgatttctctgaagatcatcgatccgctcatcatcccttaaaaggatatttccttcctgtctccagctgtgttccatttcactatttatcattcaaccttgactttccttccctcttttccagtgcttccagtttctttaactctgcttcgtcctgcttttcgccgcctttgcccttctttcttctgggcttaaactttaactggtctaccttgtattcacggatctctttttcgtctttatctactactacgatcacctttacagtctggcgcagcacatttacactgtgtacttctcccctcaggccgtctgcagtggtaactgtatcaccaattcccggcagtttgctgtttaatacctcgtaggtctcttcctcatttttcaggcagcacatcagtcttccgcacacgccggaaatcttagttggatttaaggacaggttctgctcctttgccattttaatagaaaccgggatgaactcagacagataagaatggcagcacagcggtcttccgcagatgccgataccacccaagatcttggtctcgtctctcacacctacctgccgcagctcaatacgggtcttaaatacacttgcaaggtcctttaccagctctctgaagtcaattcttccgtctgctgtaaagtaaaacagcaccttattattgtcaaaagtatattccgcatcgatcagcttcatttccaggttgtgctttttgatcttttcctggcagatcttaaatgcttctttttctttctctttgttctttgcctcaatggcacggtcctcatccgttgccatacggatcaccggtttaagaggcggtattacctttgtctcatctacttctctgtttccaagaactacgtaaccgtattcaatacctctggcagtttctacgatcacatggtccccaatttttatctgacggtctgcaggatcaaaatagtagatctttccggcagccctaaaacgcactccgattactgttaacatttctcttacttaatttcctttcctaaaacacccttaaaatacaattctattaattctctttcatggtcagaagtaaaagctccatgaccagttccatatttacattggcatctaaacggactctggccttatcaatggcccctaagatctgttccagcccttcataactgcttaaagacgccgccttcttcactgcggaaaactcatccttgaaaatgagaaggtttaaatctttggtagttttatacatcaggatatcacggtaccacatctgcataaaatccagacattccttaatatccgtattgtcatcttttaatttgcggatcacatccaaaagctgggaaatatccatttccttgatttcctttaacagctttaaaatctcttcatacatcatcttaaagtcctctgactgggccagatgaattgctttgcccagatttcctcttgcaaatgcactgtatatttctgcctgaatgtcctttacctgaagcttttcttccagataagtcttcacaacagagtcttttaatggtttcagtttcagctgcacacaccgtgaaagaatggtctgtaaaaatgcatcctggtttgtagtcaaaagcatgatcactgcataggccggtggctcttctatggtctttaaaagagcattctgggcctgcaccgtcattttctgcgcttcatctacaatatagatcttatactggctactgtaaggacgcaccataatggtatcattgatctgctcacggatatcatctacacccatactggccggtttttcatgtgttacatagatcagatccgggtggtttcctgacaggacctgcttgcaggcatgacactgcatacagggctctctgcctccttcttcacagagaagagtcatggcaaaggcatttgcaagggtcttttttcccattccttcttcgccgcttagaatataagcgtgggaaactttccccgttgctgccgcattctgaaaatgttctttgatctgttcatgtcctaagatgtctttaaattcaagcatgtggccacctcccccagtaccttgtttgttaccggatgctctgcactttgtgctctcacgatcttatcactatgataacataattactttttcctgtacacactttttccaggtgcaaaaatctccagtgcaattaccattcacaggctccatgaccagccgcctagtgccctcttacccgatcctgatactcagaaggcgcgatccccactattttcttaaactgggcgctgaaataggctgtatctgaatagcccgcagcatctgctacttcatatacctttaaatttccctcttttaacagttccattgccactttcatgcggtaataagaaagataggtggtaaatgtataatctgtctcttttttgaacacacggcttaaatagccttcgctgatctgcagctgctctgccactgtactgatattgatatcttctttataatgttcacggatctgtttgatcgcctgctctacatacttattttttgcttttctgtctgcattaaaccggaaaataggcgtttcttcctcttctttctgccggagccggtctccttcttctaactggtcgatgatccgggtcactgcctgctccagatcaccgtcctttaatggctttaacagataatcgctgactcccagcttcaccgcactctgggcatatttaaaatccccataagccgtcaggataataaatttcgccctgtttccctgttcccgcagctttgcgatcatttccacgccgtccatacggggcattttcaggtctgtaacgataatatccggtgaaaggcggcggatcacctctgccccttcttccccattggcagcttccccggcgatcatacagtttaatgcatcccagttaatggtaaatataatgccttttctggcaatctcttcatcttctaccactactactttatacatcgtccccctcctttctaagatgtcctctcagggtctttcggcaccaaaagatcccgagcgaacatccggcagtctcaaagtgacagttgttccatcttctgtcacttctgccttcaggccatattcatttccataatataattttaatatcctcataatattataaagccccagatgtccttcccgcttctccggttccggactgttgatccaggccaatatctccgggctcatgccacggccgtcatcggtaatggaaatatttaaaacatctccttcacggcctgcataaatacagatatatccattttcacagccttccagcccatgaataatagcattttcaaccaacggctgtaagatcattttcggcaccaggcactcctctaactggtccggtatctccttttcacacaagaatcggcctgtaaagcggatcttctgcacttctacatagctgtcaatggtctccagttcctctcttaaagggataaatggcttactggaaatgctttttcgcaatatgatcgccagattttccgccagcactgcgatccgtggcacctggcggatccttgcttcccatttgatggtgtccagcgtgttatagagaaaatggggatttaactgggtctggtataattttaatgttgtttcattcaggtccttctgcctctgcaccttatcttccagataccggcccagatcttctgtcatctggttaaagctgcgggtaagacgtcccatttcatcattggactgggtatggatacggatagaaagatcaccctttttcactttttccatagcttcatctaatgtctgtaccgggcgggcaatactgcctgtaagtacgcctgatacagccaggcagaggaataatcccaacgctgacaggcataggctgacggtccacatagtctgcacagctggctggctcataggcgcctggcggcataagagaaaataaaagccagtttttcctccatggcttaccagatactgttccctgtcatggcctgcatcggacattttcctgttttccagtatcttttcgatcatgtcacctgtctgaacctggctcttgtcctgtccagagcagtacaccgtccgtttatgggtatctaaaagcagcagcacatccccagatgacacctctgcccctaaaagatcatccaggttttcccttgtaaaatcaaaaacaatatagccagtttttgcaccgccttctgtatacagcggtcttgcaccctgaagcagaatgtccccgtccgtaatagaaagatccggatcagtcctgtaatatacaatatcatccgttctggaagcctttcttaaaagcccccagaatacaggcaggtctttttccttcccctctgtatccgtcgtatagcacagacggcctcctgaatcataaatagaaaaccgggcatatcctgaggtttcctgggtggcctgatataaagataagtacatctccctctggtgatctgcttcacttttttcgatcataatccgggctgtctttttatccgtggcaatggtcttgcaggcttcctcgcatttttcaaaaactgcttccagtcgcgcctctgcctttgtgatctgagtccgcccctcatctaaattctgccggtcaagtgctgccgtaaacagccggatcataaccacactggagcacaataaaggcaccagtgccgtcagcagacaggcaagaaagatctttttatgaaatgaaagcttatttaatatcttcatctttttccctgccttctttattactgttcctgttcatgggctgaaccagacttttcttccataataagcttccagatatttaaaacttcctgctgtctggaatatctctgtttcagatcttcatctgaccggtcattctctgcagccacatcttctgccggttggcgtaaaagctgggtccgtaaaagccattttgtatcatcacaggtagtgtaggttacaaatgcttcagaagcatccagatttggggttcttttccggatcgcagttccgtcttcaaagaaacattctccttcttccggatcaatgtaatctacgtcctgacctgcagccaacatcgctttcgctgcctcttctgaggtaacgccaatagaatagcggccgtcagaaatgccctgttccacctctttaaaggtctccggcatctgatactgcatattttccgctaaaaggtccagaaattcttctttttcactgttttttgccgcctctgtgagaacagaagcagccatatctgatttaagcgggtccggcactgccacgcggcctttccaccgtggttctaacaagctgtcccagcctgttggcagctctctgtaggtcactacattggtattatataaaatcacaaaggataccgctgaataccctgtccaggcatctttgcctgtctgccagtactctttgccttcctctaaggcgtccgcactgaccccaaaggccacatcccagtctgcctcttctttttccagctgggaaagcatctcctttgcagagcctgtttctacccttacattccagccggtacgctcctcaaattccttgatcaccggctcccattctttcctttcctgggcagtaaatacggtcagggcatagttctccggttctgcctgttcctgcaccagatcgtcagcccggcggcagcctgtaagaactgttccagccaatattgcagctgcagatatgaccgataaaaagaacagggaacgcccttttttgcattccctgttgaaaaatttatgtgttttatatactgcatttctgtctgcttttcctgtatacatgctgcggtgccccttgtattttttagactcgcaaacacgcgctgacgcgctctactgtccgctaatgcggacggtttgttcgttccatcagtataccagaaaaacagttccatttccacacttttacagccccaaaaacctctcaaacactacgcaggcccggactgcatcttcctctttttccatttcacagaagatacgaagtaacggctctgtaccggaaaatctggcgcttacccagccaccatttttaaagtagaccttgcagccgtcctgataagaaacacgggatacctcaaatggcagttccggcagtttctgctcttctaacagcactttctgtatacgtgccttttcctctgctgtaaaacggtagctgcgctcttccatatgagtctcaccgtactggtcctcaatatcctttacgatctcagaaaggctcttaccggtcactgcgatcatttctaccagaaggcttgctgcatagataccgtcttttccatggatatgaccttttacagtcaggccaccggaagactcaccgccaataatggcatctgtctcctgcatctttgcagaaatatacttaaagcctacaggcacttcataacacttctggccaaagctttcagccaccttgtccaacatatgggtggtagccaggtttcgtactgcatcgccccgccaacccttatatttcagaagataataatacagcataactaagatctggttggcgtgaagataatgtcccttatcgtcaataacacctaaccggtccgcgtcaccgtctgtcgcaataccaatatcgcagtagcggtccagcacataattctgcaggttcttaagggtatcttccgcaggtgccggcatcttgcctccaaacagcgtatcatgctgggcattaatggtctctaccgtacatcttgcaactgccagaatggtgcttaaagccgtcaggctgacaccatacatggggtcaactgctacccttaaatctctctttctgatcgcatctacattgatcacagataagatattatccagatattcattcattggattgatttcttctacaatgccctgttttaccagttctgtataacttggcggcggcatctgcccatcctcttcatgacatggtgtatacagtttttctgcttccaacagccatttttcaatgtcctttgtctggatctcatctgcatcccttccgccatatgtaaacaccttgataccattgtagatcgccggattatggctggctgtgaccatcattccatagtccagttcatgtttcatcacataaaacattaacagaggcgttggtgcgctgcggtttacaaactgtacatggataccttcttttccaaggatctgacatgcccagatcacagcctctttggaaaggaaacggcggtcataaccaatgaccacactttttgtgtccttatgctctgccttcattttcaggcatatggctaaggtcagcttctgtatattttccttggtaaactcttctccgataatcgcacgccagccgccagttccaaattttaccatttgtgtgttcctcccatcttttcaatatacatagacttacaaagcctgcgccagaggcgcaggcactgttttcatgttgcagtatgaaacaaattaaacgatcgataccttacccttacttacctttaagaagataagcagagaaataactgtacttacggtcaaaatagatgccagcgctgccgctgtaccaaagctgtttcttacaacctctgtataaatagctacagaaatggtactggtcttgccgccgtaaagcataacactggaagacagctcattgatacaggtgatccagcttaagatcgcaccggataatacgccaggtgccattaatcttgctgtcaccttgataaatgtctgcataggtgatactccaagactgatagacgcttcttctacgcttggatccatctgctgtaagaaagcactgccggaacgtaccgtataaggcagttttcgtacaacaaaggcaatgatcatgatcactgcggttcctgtaaggatcacaggttccttgttaaatgccacgatcaggctgataccaagaactgcgcctggaattacgaatgggaacatgatcagcagatccattaactgtcctgcaaagcccttctggcgcacaacgatataggagatcagcataccaataatgatgataaatataatggcaatggttgaaaatacaaaggtattgcggatattggtccacagacggttgaaaatcgtaatatagcttcccaggctgaatcccttcttaaatcctgtaaagtcgctcttgataaagctgctgacgataactacgatctgaggaaggataccgataaatgtaaccagcataaccgggaatgttgccaggaaacgctttactccgtgaagtttctcttcctttggcggacgcatggcagtcattacatagtttttctttgtaacaaaatgcttctgcaccagaaggacggtagtagaacagaatactactactacagaaagagcacttgccaggtgggcatttccgccgatctcactcatgtactcattatatacaagaacaggaagtaccatataaccttcgccgatgagcattggagtaccaaagtctgccagactggtcataaataccataatggcaccggctgcaatagacggaaggactaccggcagtgtaatggtccacagtctgcgaagcttgttacttcccaggttctctgcagcctcttccagactggagtcgatgcttcccatagcaccggaggtatacagataaacataagggaacagcttaaaagtaaataccaggatgatacccagttttccgtaaatacttggaagatggataccaaactgggaaaacatatttgtcaccagaccagaacgtccaaacaacatgatccagctgtaggcgccgataaatggcgggctcataaggctcatgatgataaaaatatggatgaactgcttgccccatacattataacgggacattacataggcaataggcacacctacaaccagtgtggtgatcgttgttaccacagatacaaaaatacttcttcccaatgcggaataataatatttctttgtgaaaaatcggatatagttctcaaaggtaaagccgtctaccttggttgagaaaaagcttcgggtgatcagggtacagaagggatagatcagaaataccagcataaatcccacaactgccactttcacccagaaccagaagtctaacttctttccggaacctaccatgagatcacctcctgggtcgctgcatcatatacacctacggcgcggatgtcaaagtttacctttaccttttgtccatccgggcgaagttcatgtacatcttttgtatactcatttaactgtacggtctgtccattatccaacaggatctcatattcaatgaagtcacctaagaaagtggaaatgataatggttcccggcagtccctctttatcgtcaaagaacagctgctccggtcttgcggaaataattcccttaccggtaaatggcttctttaaggtacaggtaatagaacactctcccttaatatccagcactgcctgatttgggtcatctcccttaacatcacactctacaaagttggaaacaccgataaatccggctacaaaggtattttccggctttttataaatctcttcaggagttcccacctgcataatatttccttccttcataacagcgatccggtcggaaatagccagtgcctcttcctggtcatgggttacataaatcgtagtaattcccagtctgcgctgcagctttttaataaccgttctcatctgcacacgcagctttgcatccaggttagacagcggttcgtccatcaacagaacaccaggttcaataacgaaagctcttgctaaagcgactcgctgctgctgtccgccggaaagttcatttggttttctgtcctttaacttgccgatctgcaccaattccagggcctcttctacttttccagggatctgatcctttggacactttttcgctttcaggccgtatgctacattttcagccactgtcagatgtgggaaaatcgcatagttctggaagaccataccgatgtctcttttatgagcctccagattgttgatcacccggtcatcaaaacagatctctcctccgtctactgtattaaatcctgcgatcatacgcagaagggtggtttttccgcatccggacggccctaaaagggtaaaaaattctccctgtttaatatccaggcttactccgtttaatgctgtaaaatcaccgtattttttcacggcatttttaatgatcactgcatggctcatatatctggtcctcctttttgttcaatgtcctctcaaaatctttctgcaaccgcttttctggaagacactcccactttttacattccttatatatgcgaaagactgcccgcccgccagggccaggcagtctttctattatttgtttcccgttactttcatttcagaaagattaatctaccataatatcattgaagtgttcaataatggactctttttcatttgcagcccagtcaaagtcataatcaactaataccaggtcgctcagctttgccagtccatctgcaacgtccatatcacttcttacaggacgacgtccccagttctcgctctgctctgtctggcactctttagaggtaacgaagtcgatgaacagttttgcattttcttcattcgggcatcccttaacaagagctacaccatccggaactgcactggttccatcctttggatatacaaatccaacagaaggatcatccttgtactgaacagctgctttctcaagagtaagacctacatagaactcaccgtcagctaccatcttatggcacttacctgaagagtcaacgatctttccatccaggttgtcatacagtttcttgatgaaatcccatccatcttccttgccgccatggcccaggatcatagtacataactgggtgtaagcagaaccggatttagatggcaggcagtatgcaattttgcccttccactcaggctttgtcagatcttcccaggtctccggaatggtcattccgtctttttcgatcagatctttattgtagaacagtaccattggcagtgggctttcaccgatccacttgtcatccgggtctttgtactcttctgcaattacatcatcatttgcacaaacatatggtgcgaagtaatccttaaatgctgccagtgagtcagcaccgccgccccagagtacatcagcgatcgggttagcagactcagctgcaatacggttgcacagctcgccggttccggctgctactacttctaccttaacatttggatacttctccatgaacaggttcacacctgcatttaacggatctgcatcatgaggagaatatacaactacggtaccggagtaatcttccggagctttcccagcggttgcctcagactcttttgcttcttctttagactcttccttagcttctgctgctgttgtttcctctgccttggtctctgccggtgctgcggtagtagcggtgtttccgcctccacatgcggtcatactcagtaccatcatggctgccagtgacgctgctgcaaatctttttttcatatacacctctccttttctatgtaccctcccggtacatcgttcccggtctcaccgggacttaaataaattttgcagtctgaaaactgcttctcacgttctttggagttttcgttacagatcatatagcatgtaccgtaacttttcactcctgatgatgttattatataattttattatgcatttttccatttgttattctaacttttgttgtgttattctgaacttttgtatagtttttatgtcatattttatatttatatgtgcatagtacacatacaccagcaataaaacaggaccgtcctgtcataaacgcagctaacttcttactgttactacgtctatttacaacggtcctgttttcatctgtcgattttttctgttacaatacttctaccttaaattaccctgttctgcacagacagagcacctgtattttaccacttataatgcttgatcagagcctgggttcccagatctcccatgccttcctcttccagttttttacaaattccaagaacatcctctaacacatctaatttggttcctctttcggatgcttcctcatctgcaaggctcatatccttgataaaatgctttaagaagaagcccggtgcatagtcatcttttgctgccttggaagctacattattcatctgggcgcttcctgcagcacctgtggaaatagatttaagcattacatctacgtccagtcctgcattctttgcatagaccatagcttcacacgcacctgctaaagcaccagcaatggcgatctgattacacatcttggtgtgctgtccgtttccggactttccttcgtagttgatagcctttcccattgcctcaaatacaggcagacaggtatcaaagtcctctttatcaccgcctactaaaatagtcagtgttcccgcctttgcaccgctgtcaccgccggttacaggggcatctaagccatgaagtcccctattctttgcctcttcatagatctgctggtctaacttcgggcttgtagtggtcatgtcgatcacataagtgcctttatctgcattttcaaggataccattttccccgaaatatacttcctctacatccttaggatatccaacaatggtaatgaccacatctctgcctttagagcagtctgccactgtatcacaccatacagcgccctctgcgatcacatcctccacctttgactttgttctggtataaatagaaacctcataaccagccttcatcagattgcgcaccatggattttcccataatgccaacgccaataaatccaattttctttaacatctgtttctcctttccttcgttacacaaaatgtcctttatgatttcttctatacacggttcaagcccggtattttcatattgttttctgatcccgcactgatccagacgttcttttgcaaagtccttttcatcagctaagaaccttcggcacatttccgcatactttggcactttttgcgttttttctctgtttaatgcccgctgcagacgttcaccgtcttccacatggatatataaagggaccatgacctctgccccataataactgcagagcttttcataagactccaatgttcccatcatcagataactgccggatcccagatcgatctgcccgtcatctgccgtaaaataactccacggcccgtaaatggtatcataagtgcggcattcgatcactttacctgcatccttcatagcctgaagctgcttctcatcggtgaaaatgtactccaccccattggtctccccatcacggatgggcctggtggtgtacatgcggactgttccaagttctggcagttcctttaccagacgtttgtaaatggtgtccttacctgaggcactttttcccattacataataaatctttcccattatgtttccatctttctctttctttttaaacggacctgccacctgataatgccattacctgtatggtgacaaggtctgtatcttccagtccctggaccggcagatctttttttatataatcctgtaatgtttccagtatttcttctgtgatctgctctcccggcgctaacagcgggatacccggcggataaatataggcaaattccccacagatgcggccgcagctttcttttaaaggcactgcttccttttccccgtccattgctttaaaaacaggcatcacctgctttgcatgacggctgtaaacattttcatcaggatcatcattgcagatatttccatttttttccagttctttgtcaatttcaagtaatgcctttttcagacgtttcagcccctttttgctgtctccaatggctgcaatggccgttacataatcagcaccgcacatttccatttccagatgatacttgtcccttaagatctgggaaagcatttctccggtaagcccgctgcctcttactgaaacaacgatcttggaaatatccacatcaaaaatccctgctgttcccctcaggtcccgttctaccaggcgcaggggcttcatttttcccagtttttttcgtatcttaagcaaagcagcttcaaattcagccactttaccttcttttctatactgatccatgagaaaaatgctgttctcaatggacgccataagcacataagaaggactgctgctctgatagatctgcagataacgctctacctttttcacatccagatagcagccaccatccggcctgttatttttcacatggagcagcgctgtctgggtaagacttggcagtgttttatgcacactctggatcaccgcatctgctcccagttcaagggctgactttggaaacgcatctccataagcaaaatgagcgccatgagcctcatctacgatcaggggaagacccgctttatggacgatttctgcaattgccttcacatcagaaacgatcccgtcatacgtaggcgaaaccatcagcactgcctggatatcaggatcattttttaatgcgttttccacatcttccggtaaaat

SEQ ID NO: 3536 - DNA, 32458 bp, Unknown
  gut microbiota DNA sequence
gcggcatctgcaatactggaagctgttgcatagccgtggcttaagataataccggctgcggaaagtccctggatcttctggttctggttttttatatctaaaagcaaaaacagctggtttaaactgtctgcttcaatgtccagattcagtttgatcaggtttacgatcctagaacagatgactgattctttttcaagaacagcgcttacagcctgaaacatttcttcaatctcgtcatggttttgtttcatccagttgtcgatcagatggtcgccctgaagctgtatatataagcggcgggcaagtaagtggctgtattttttggaaaggctgatgccatacatttcacctacattttcaaaaatctgattgatcagctgttcgtaagtggagatcttgatgtttacaagcttctgtccgtagatcagatagtcgtaataatcatttaattgtttccggaattccatcatcaggccgtcaaaactgagcatatcctgacggtaatcttcaaagacatctaacatgatctggaaatactgtaccgtctgccccaaagaggtgtcacggctgtaactgtttaagtggatcatccgtttgtctttgtcctcaacctccagttttaaggaggagagcatatattccggaaggtgataactgtggatagcgataccatcgctggttttttccagataagctccggcacagctgctggtaacgcaggtttttaattcgtcgatgttgttttcgtaggaaaattccagcatacagtggaaggcattctgactgatgcttacatctacgcccatgcgccgtccttctgcttttaagaaggagactaacatttcctctttttcatcggctgtgcgttcatgtaatgttgggaccgggatcacaatgggaatcatccttgcaagtggcttataaagtgtttccgccggtacttttgtggtggaaaatatcagtcttgcattggactcaaaaacatgttcgtcatcatgatatcctttgtattgtcccgaaattaagtaggaatagatcagttcctgtcctgaaaatggaagcctgtcaatttcatcaaagaaaaggatgccgccgtttgcctttgcaagccagccttttccatcttcgctgccgcaaagggaaatagcaaatttttcttcattctgggcatattcggagcagtctactgtgatgtaaggcgggagagaagctgcgcctgcagttccaattacccgttcatttacagcatattcatacatcagcctggaaagaaaagactttcctgttccgccggctccgttaaacaaggccggaagaccatttggcgggtatttaacagctgccttacactgctcaatgcaggaacttaaactcaggtaataaccgatagctttctgaaaatctcttttattttcatcgcttcggcatttccgctgaaaatcgtccataccggagaatacgcaggtttccagggcgacctgggcttcgcgttcaacattttttttatggaagaaataaacgggacgggagttgaccttaatggcccgctcttcttttaccagctcattcagatactgactggccagattacgggaaatattcagtgattcgctgatatggttcgccgtaaaatatttcagatctttcagggcatagccccggcttattttttccaggtaaagatagagttcttcttttgtgctgagcatgtacatgattctcctgtttgttgatttaacttgaattcttttcgcgcgtgttttatgtctacctgataacaagtgtaattatacaaaaaatagtctgaaaagaaagatgttttgaatgatttcgccagtttgaaaagggtttcggcagtagcggggagaaaaatggggagatgtccagagcgggggaatagggttcgacactaggattgacacttttatgggggaaatatgtgctatacttaaaatcagatgtcaggatcaagatcaggcacagaaagattttgggagaacattatttataggaggaatcaatatgcatagtgaaaaaacaactatccggctggcagccgtagatatggacggaactcttcttcatgatgacaagagcatatcagattatacattagatgttttaagaaggatcgtaaaaaaaggcgtgatcctggtacctgcctccggaagacccatcggaggaatgaaagaagcagtattaaataatgtagacggcattcagtatgctatctgctccaatggtgccatgcttatggatgtaccggaggaaaaaagtatctgtgaaacagggatccccacagaaaaagcagtggaagccattgcgtatctggaacaattcccagtggctgtatatgcccatacagacaaaggtactttccgggcagagggctgggagaaaacagggctttctgagaaatatccttatatcaggttcagcgaaggaaatgtaaaagatctgggagcgtttttaaggaccagcggagtaaaagtgatgaaaatgggtgcttttgtcttaaaagatggactggcacaggaacttctggaaaaaggaagccctataccgggtatcgtatttttgcgcaccggagatgggatcatagaattaaactctgtggatgcctcaaagggaaatgcactgtgtacactttgtaaaaaattggggataagtatggaaaatgttctggctattggggataacgaaaacgatatttccatgcttcaggctgcaggcatctccgtagcaatggaaaacgcagaagatgatgtaaaacaggctgcgaaatttgtggccgggcataatgaagaggacggggcagctcatttcctggaggaatgggtgctgtaaaataaaacagagaacaaaaaatggacgcgccggctgacgcgtccgtttgctttgtaaacttgtgatccactgcctgctgacgcaggcggttgtcagagtattcctgtagactgtaaaaacagtacaaacatcataaccgggaccacatagcggatcatgacgcggtacagctttttacggcggaaagtatcgccggtgctttccatttcttcgatcacatagtccggtgttttgatccagccgatcagaaaggcagagagcagtgcgataaacggcatcataacgctgttgctgatatagtccatgatgtctaataactgtcccacagagccgtttggcagttttacttcaatatagaagatactgtagccaagggcaataacagcagaggcagccaggtagatcacagtcagcacaaggactgttttcttgcggcctgtgtggaagatctccatgcagttggcagtgatagattccagcacagagatacaggacgtaagagtagcgaaaatagttgttacaaagaacaaaagaccaacaaaggtacctgcttttcccatggcggcaaataccttaggaagggaaatgaacattaaacttggacctgcgctcattccgtcggtgccggagaaaacaaaaactgccgggatgatcatggcgcctgctaaaagggcaacgcctgtgtcgaagatctcaatctgattaacagctttatttaagttaacttccggtttcacataagagccataggtgatcatgatacccatggaaacacttaaggaaaagaacagctggctcatggcatcaagtaagatctgaaggaagcggctaaaggtcagtccctcaaaatgaggggttatataataaagaaggccgtccataccggtacgcatctgtccgctttcgtcaacatggtgcagtgtcagggaatagcctgcgatcacaaccaccagaaccagaagtatgggcatcatgcaacgggaaacacgttcaataccgccttccacaccattgtatacaataaacgctgttacgcccataaataaaagggcaaacaggacaggtgatacaggtgaagtgataaatgaggtaaaataattgtcctgggctgcagcggcagtctgtccggtgagatagacaactgcgtattttgtgacccagccgccgataacagcatagtaggtcatgatcaggactggaacaagaaaggttaaaattcctagaaatttccatttaggcgacatctgggtataagccccgatagcgctttcttttgttctgcggccaatggcaatgtcagatgccagcagtgtgaatccaaatgttaagaccagtgccagatagatgactaagaacagtcctccgccgtcctttgccgccagatacggaaaacgccacaggtttcccacgcctacggcactgccggcagcagctaaaacaaaacctaactggccggaaaaattacttttcttcttattcatgaaaaagaatccccctaaaattatctatagctgaacttgcttgtcataccagaatagcacatgttataatatcagtaaaacaaatgtttttatgactatatataattttttgtaatggatatggggctatagataaatttatgaaagaacagaaagacagatatgagatatttttaaaggtgtgcgagaccggcagcttttccggggcggcagaggcattaaattacacacagtccggcatcagccagatgatggctggactggaagaagaactggaagtccggctgtttgccagagtaaaaaagggagtcatacttacagacaacggagccagactgattccttatattcaggaaatggtaaaccagaaggcaaagctgcgccaggcggcctttaatattaatcataagatcgaaggaaagctgcgggtaggaagcttttccagtattacagcgttgtggatgccgggagtgatccatttcttcaaagaacattatccaaaggtgcaggtagagatctttgacggcaattacgatgagatccgtgactggatcatccacggacaggtggactgcggtttcctgtcatctattgtggcagacgacctgaaattttatccactgatggatgacccgctgtgtgcagtgatgcctaaggggcatccacttacagaaaaagaacgggtcacagtgtcagaactgttttcgtatcccttaattatagaaacacctggctgcgacaatgatatccagcatttattagcaaaatgttccgtaaagccgaagatcacctacagcttccgggacgatacactgatcatggcctttgtaaaaagcggattaggcgtcaccatttcccagaaaatggtactaaaagcctttgccagagacgatgtagaatccaggcccttagaaccagcttcacaccggaccctgggactggcattttcaaagacagccaattccgtggtgtcggggataatgttggagtatttaaagaaaatgacgggataaatcataagccagattgaaaattcagccaattaaaaccgatgaaaacttgcctaacttctctaaagttgctataattcttgtaaccgaaggcgtgataatctttctcaaaagcggggaagatgcaagtatatgtacacggcgtaggtgtgcatatagcaagtaaggagaagtcgtgcgtactttaaagaaatccatatggagttatatgtataaggtcacatttgcgttggtaagtgtgatccttattagcattacggcattgaatatagcaaatgagcagagccgggcgcaggggacggcggataagatctttgagcagatggataagatgctggaggagaatcagaaggaacttaccaggctgcgccaggaatatgctgcgaaatgtcttcataatacagaggctattgcctatattctggagaagaacaccggggcaagaaatgatctgtatgaactgcgtaagatcgcggaatttatggaagtagatgagatccacattattgatgctgcaggcgagatcgtttccggaacccatccccagtattatggttatagctttgactccggggagcagatgaattattttaagcctatgcttaaggacaaatccctgaaaatggttcaggatatagagccgaatacagcagagcataagctgatgcagtattcagctatgtggaacagcaccggggaatttatcgtggaagcgggaattgaaccggtaaatgtatccaaagtaacagaaaaaaatgaactgccttatattttttcccagctttgtgtcaacccggatatcagctactttgcggtaaatgcagaaacagaaaagatcgtaggtgctacggacacagaattagtgggaatggacatgaaggaaattggtttaaatacggaaaagatccatagtacaaaaggtttttccggtatgatcaatggaaaacgttcctatatcgtatttaagaaggtagcagataattatatcggtgtggcagtgaccagtaaggcactttatgaacgcataccgttaaatatgctgtatctggcggtatgtcttgtactcattgcgctggcattgtttaaggcagtgacccggtatctggaccgggaggtagtccagaagatcggggaagtaaacggaaagttgcataagataaccatgggtgacttaaacgtcaagattgatgtccacagcagcagggaattttttgaactgagccgttatattaatgaaatgctccagagcctgttagtcaatgacaggaaaatgacatatgtgcttggaaagacggatatgcacattggtgtatatgagtacaaccggcaaatgaagagagtccgttttacaggtgatattcttcagatcttaaagaccggcacagaagctgcctggaagctgccttctgactgggaagatttcaagaaatatattagaaccatgcaaaaagagccggttgcaggtgaaaatgagatatttgctgtaggaaatggtaaatatttaaaaattgaagagatccaggagggcgaagagatcttcggtgttattacggacgttacagaggagatccgcaagcgcagggagatcgaataccagagagatcatgaccagctgacggggctgtttaaccggactggcagagataccaggctttccaaaatactggaagaatgcagggaaccatattactgcgctgctgttatggtagatgctgacggtctgaaaatggttaatgacacttacggacatgaaaatggtgatgagtaccttaaaaggattgcagaaatgctgaaacaggaagcaggtgaaaacagcattctctgccgtcagggcggtgatgaatttacattgttctattataagtatgggaaagaagcgcttgtgcagaaaatagaagccctgaaggcgcttcagagcggacagaaggtccggctgcgggacggacttaccgttgatctgaggttctctatgggaagcagcatggcttacggcgcagtagattatgataaaatgtaccgtgaagcagatgaaaaaatgtatgaagataaaagaatgcggaaaaagctggcagaagagacaaatacaatagaatcttaggaaaattcagaaaaaatgaaagaattatcccatcatggtaaccctgaaaaccatgatgggataattttattaagaaaaagagggaataattgacatcaggaatctgtctgtttataatgtaggtcagtttacaggtcataggatttacaagggagtgaatcgctgaaagacatgttctttcagcatgttcatttcctttttttatttataagcattgaaattgaaaaggagggggatgaatatggcggagcttttaagaatggaagggatcaccaagcagtttggtgcagtctatgccaataaggatatcaatctgtctattgaagaaggcgaaatccatacacttctgggtgaaaatggtgcaggaaaaagtaccctgatgaatattctcatcgggctgtatcagcctacttccggtacgatctggttaaaaggcaaaaaggtaaagatcgattcaccaaaaacagcagtaaaactggggatcggaatggtgcatcagcattttatgctggtggatgccatgacagtatttgaaaatattatccttggaacgaaaaaggacagttccattttcattaaaaaagaagaacggaaaaaggaaatcctggagctttcacaaaaatacggactggaagtagatctggataagcaggtaaatgagatttctgtaggcgaacagcagcgtgtagagattttaaaggctctttaccggggagcggagcttctgatcttagatgagccaacggcagcgctgacagaccaggaagtagaaggtcttttctctattatgggaagactgacggcagaaaacaagtctgttatttttatctcccacaaaatgcgtgaggtaatggcagtcagtgaccgggtgacgatcctgcgggctggtcagactattactacagtggataaaaaggatacagatggggcacagcttgcaaatctgatgatcggccatgagatgacagtcagtgcttataaaaaagtgacagaaccgggagaagatgtgctgcgtctgctccatgtggattatcagaaggatcataaacacagcggtttaaataacgtaagcttctccataggaaagggagaaatcctgggagtggccggagtagacggcaacggacagtcacagcttgcgcagctggtaacgggagttatttcaccagacagcggagaagtggaattaaattcccacaaagttgcccagtttgcgcctaatggcttcattctttccaatgtatcccatgtcccggaagaccgaaacaaaatgggtctggtaggaaatatgacagtagaagaaaatctggttttaaaggccacggaagaacctcgtttttcctatgcacacggcgctttattaaagaaaaaagcgatccggaagtttgccctggaacttcagaaaaagaatgatatccgctgtgcttctattgagcaggaagcaagaaacttatccggcggcaatcagcagaagatcatcttagccagggaaatggaaaatcacccggaacttttagtagcagtccatccaaccagaggtctggacatcggggcttcccagtatgtacacgataccatgatcgaagcaagggacaagggctgtgggatcttattgatcagtgcggattttgatgaagtcctaaaactttcagaccggatcctggttatgtttgaaggccaggtcatgggaatttattctggtgaaaatccgccggtagaagaaatatccctggcaatggcaggaaaggaggaatagggaaatgaaattaaaagataatctggcaaagatcctgatccccattctgtcgatcctgatcgcatttatagcaggagggatcatcatcctgtgtctggggaaaaatccggtggaagcttatggatacctgttttccggtgcatttggaagcggacgtaagatggggcagactttagtaattgcatgtccgctgatctttaccggacttgcagcagcctttgcctataagtgcggcgtttttaacctgggcggtgaagggcagtttattatgagtgcagttaccagtatctttgtctctgcaaaactgggtgacgcaggaatgggcggacttcttgtaagccttcttgcaggaaccgttgcagggggcatctggggcgctattcctggtattttaaagatcaccagaggcttaaatgaaatgatcgtcagcatcatgctcaactatgtggcaacgctgtttatgggatatgtgtatacaacccttttgcgtgacggcagtgttccacagacggttgcagtggcagacagtatgaagattgccggtatttcaaaaggatttccagcccattggggtgttctggcggcgtttttgcttgcagcggttttatactatttcattttttatacgtccaaaggatttaagctgcgggcagtgggaatgaacgcaacagcggcatttttcaatggttttcccgttaataaatacatcctgttttcttttatcacttcaggcgctattgcaggacttggaggaagcatagaacttcatggaaaacagttccggcttatgagcggttttggctccggctttggtttcgatggcgtggcaattgcactgatcgcccagctaaatccattgggaacggctattgtggcctgcattttcgcagtgctgcgaaagggcgcaagtaccttgcagacagccacgcaggtaccaagctctgtggtggatatcattcaggctctggtcattatctttgcagtagccggaaccgcattattaaaacttccgacgatcaagcagttccttataaaccatggaaagagaaaggaggcgcagggctgatggcatcattttttacaatgaattttctcacagagcttctgctctcaacggtgcgcatggcaacgcccatcctcttggtggctcttgcggaaacctattcagagcgtgccggaatggtcaatatcggtctggacggcattatggccattggtgctttggtgggctttctggtgggatatgaaacaggaagtccctgggcgggagttttagcaggcgctctttccggtattgctaccaatatgatctacgctttctgcaccattaccctttgcgcggaacagaccgtttatggtatggcgatcaatatttttgctccggcgctggcatcttttatttaccggctttccttttctgatacgtctacactgatccagggcgtgtctatggggatcatgcccatcccggtactcagcaagatcccggtgatcggaagtatcttcttccagcagagtcctcttgtgtatggggcatatcttctggttgccgtgacagcggtatttttaaaccgtacaaaggcgggactgaatttcaaggctgtaggtgagttcccaaaggcagcggaaacactgggaattaatgtagttctccagaaatacattgcctgcatcatatgcggtgccctggccggtatcggcggtgcatatctgaccatctgttatacaagtacctattcagaaggcattgtggcaggccgcggatttattgccttatcagcagttatctttggacggtggatgccaacaggagttatgtttgcatgtctgctttttggcttctgtgatgcgctgcagatccgcttacagctgttaagcccgtccactccttatcagatccttcagatgatcccgtatctgtgtaccctgtttgtacttgcatttttcggcattaaaaagagcggtccgaaggcaaatggacagccgtattacagggaagaacgataagaaaaacgatgaaaaagtaaaaattattttataggaggaatagattatgaaaaaacgcaacatgaaaatgacatctgtagttttgacggcagctcttgctgcagtaagccttgcaggctgtggcggttctggaaaaacagagacaacagtagttgcaggatccgcagacacaacagcggcagaaactggttctgaagctgaaagcagcgaagcagcaggcggggaagcaaaggaaggtggttacaaggtagccatgatctctgacacctctgtatcagatggtggatggggcgcaagctgctatcaggcaatggtagatgcagcagctgaaaaaggctgggaaaccgtttatacagacaatgtggcaacctctgattatgccactgttatgactgattatgcagaactgggatatgacctgatctttgcgccaggcaaccagtatacagatgcagtaaagcaggtggcagaggaatacccggagattaaatttgcactgttaaatggtactgttgagactgacaatatccagtctatccttccagatgcagagcagatcggttacatggcaggtgctctggcaggactgatgtccaagaccaacaatatcggatttatcggcggcatggagctggataccacaaaagcaaaggtagaatgctatgaaaaagcagcccagaagatcaatcctgacatcaaggtatcttccgcttatgcaggctctttcagtgatactgcaaagggcaaagagatcgcagcatctatggtgacaacttatgatgtagatgtcatgtttggtgatgcttccgcagtagataccggtgcaagagaagcgctggcaggccaggaaggcagatatgatattggacagccaggagatttaggttctgcagatgataaggtgatcgcatgctctgttgtaacagacaatgcagcactggtaaagacctgtatggaagacattgaaaatggtacttttggaaataagactgtttacggtgatttaagcaatggctgcttaagcgttggtaccttctcttctgttgttccggaagatatccagaagcagtatttagaggtagttgatcagatcaaggctggaaccttccttaactaaacgatgtcctctcggtgtctttcctgcacctgcctttgataggaccataaatgaaaatgaatgaagaaataatagctgagctgtgaagcagagcacccggtagttggaaaaataagactgccaggtgcttttttatgttggggcacattctttttactttcaagttagggcgaagtgggatataatgagcgcagaacagtagagcgcgttgacgcagggctgtaagtggacttgggtgagttgttaaattcacttcggataaaggagcgataaaactatgctgacatcagaccagaatagaaagataaatgaaatcgttgaggaatttaaggaagcggctgatttttaccgtatggagtattccgaagaccttatggggatgtttcgggattttgggtgtatgctgcttttgaagtgtaaggtggatacagaaggaaaggcggatctggagcgccttttggaaggccgtcataagctaaaaggaacggtaaaacgtcagcttatgactgtatcagaggaactggcgcagctgtgggaaccgggcgaacaggatggatctggggataccggggaatatgaaggttcccaaaatgtttgggaaatgtttcagacggctcttgaagagatctttcatttctgcctttacagcaaaggcggtaaaaacaggtatctccttccggaagaaacagcaaagccgcttcttcgtctgctcacatttccggaagggatgatggcgggaaatgaaggcctggtggttttagatacccagtgcggtgcagggagtgctttaatggcagcttcccggtacttaaaaaatctccggcttatgggctacgagaaggatgaagaaatgtgggcggcagccgtgatcatgtcacagctttccggtcttgagatggaactgcatttagaagacggggcacgggcggatctgtatgagtcctgtgatctggtgatcagcaatcctgtttatggaaccgataccataaaagacgaagaactgatcgatcagcttccgggagaattgaaaacagtcaggggacgttatcacatggagctgatccgcagcatgcaggcgttaaatttcgatggaaaagcaatgctgatcgttcccaacagctttttatttgcaaaccgcacagaaagtatgaaggtacgcaaatggcttcttcagtcctattccctggaagcaatcatttcactgccggaggatactttcatgtacagcggtgtccgctccggtgtcatggtattcagtaagccttttatgtccggcggttgggaaggacatacccagagagtactgtattataatctggaaaagcaggaagataaggaaaagcagcagaaagaatatgaacgtctggaagaggtatggagccagagagacagttattatggaaaatgggagcgctcccgcagggaaaaaacggtggaaaaccgcaacggtataaaggttcctgcaaactggcagtacaacagtttctggtttgcagatgtggatcagatcgaggcgggaaaatggaaccttctgccggaaaattacagaccggaagagcagatcaatctggaaatagaggacccggctcttcttttgcaggagatgcttaaggaacaggaagagattacaaaggagttaaatgaacttcttaaggaggtaatgtaaaagtggaaaactggaagcagaaacctctgagccaggtggtatccagatggatcagaggaaccaccttaaaccgttcaagggctgattattatacgaaaactcctggaccggaaagccttccgtgggcaagagtgggagatatgaaagaaggacttctttgtgaaacagaaaattatcttaccaaagaaggagtagaccagatcccgtggctcatcgtgccagagggcgctgtgttactttctgtatcaggaactattggaaaaagtgctattgcaggctgcgatctggtagtgaaccaggcgatccaggccatgatctttgatgaaggacagatcctgccggaatatgcctgcttttatctggaattttaccgcccatggcttatagagcgggccaatgcggtgactgttccaaatctgacgaaggaacagctgtcgggtattcctgtggtattcccttgcttagaggagcagcaggtcattgtggatcaattaaaacgggccagaagactgatgcaaagaagcaggagatcggaagatacgttgaacaggatcctggaaaatgcttttggaaaaatagcccggtctgctttaaaagaaggaaaaataagccgggacgaggaatttctttctcctgtgctccggcctatatgggtttctttaaaaacacgggtactgcctgcagaacacgaaacagatatgtttgtaccggtcctttcacaaacagagcaggtctcttttataaaaatagtagaaagaacaaaaggaataagaaaacggttacataaaatacagcaactggagatacgctattttaaatccatgctgtcactggctttcacagccggtttaacagaaggctttagaaaacaggaagacctttcagacccggagcctgctttattcagggagagctacggaatcggaaatgtgcgaaatgtcagccagccaacagaaggcattacagactggcagagccgtattccacaggaattgcagtctctttttaccatgctgtctgatttccagatggagatcctgcgtatctatgcccagtcacaggaggcaataccggtacatacggtgtttaagcagatccacaaaaagggatactcagtacaggatgcccttgcttctgcaaggctgttggaagctttgggctttctggaaaagacggttccccagaaactttatatgggagaaaaagaggtacgggacagtgcaggtcatcccattaccatacagaaatatcagatcccggaatacggtgctgatatcagggaggtctgagataaaacatgaaactggaatacttatacatagatggttacaaaggattgaaacgcctgaagctgcagtttaaggaacagacaggggttgtgcctgtggatttcctcatcggctgtaatggctccggaaagtccagtgtgttggaggctgtggggcttatttttacccgtatcatgcaaaatgaactgccgggatttatctttgagttaaaataccggatgccggatgggacaggaatttatgtaaagccccagaaaaagggcttttgcgatgcttccgggcggcggagaaaattatatgtagaactggaaaaaaatgggaaaacccagcagctatattccataccggatgagtatctgccggaccggatcatttcgtattgctccggagccaacagctctatggaagatatcctgatccgttccccaagggcttctcttgccagtgatctgtatgatctgtctctggctatggatgttgaaaatggagaaggtccggtatctggaaaagaggaacacccgggagaaagcagtgttgcaagaggggaggcggcagaagagatattatccttttatgagcggttagatgtaaatccgcgagtgctgtttctggatgcggttacatctaaatttatcttacctgcattgtttgcagtgatgccttttgatatgcaggatgaccgtatcagtgaaaaggctctgcgatatgccacactccggaaaaaacttctgaaacggttaaacatccgtctgatccctgcggcattttcccttcgtattgatgataccaggctggaagaggcagcagaccggccccagatgagtattttgcggcggcttttaagccaggatgtaaagggaaaagccttaagcaactgtgtgatccaccggacttctacagaccggctggaagaggacggaagccttgccggtgaaacggcagctgtattcctgtttgagtcctgggaagcagaaggggagaaagtattttatcatcccatgcttcagcgctactttgacggaaacccatttgctcttatctcaaccctccttactgcctggagggaaggtgtgatccgggagatccatttttcctaccgtaacggggatgaacgtggcttatatgaaatggaggacttaagcgacggtgagttaatgtggctggcccggatcggcctgatccttatggcacaaaatcactgtggggaaaatacattgttcctttatgatgagccggatgtgcattttaatgatgactggagccgggattttgtccgctttgtatatgccatgtgcagtatggatgggaccagcggaaatgagtttctggtagccacacattcagacctgatcttaacagatgccatgcggtcgcagatccatttgtttgaaaatcctacaggttccaggacagaagtaaaagagctggagatctccacctttgcagcaggccgcgacagcatttcaaagcaggtgtttaaggcttcttctattggtggtttcgcatcggacacgattaaagaactaatggcagaaacggatccggaacagctggcccaggctatttcaaagatcggtcccggttaccagagatttcgcctgcaggaacagctgtatgccttgttagagaaaaatgacaggataaaaggttaggtacttttggaacgaaagaggtgacagaagatgttttggaatatggacgtaggagaacaggaacaggatctgatggagatcagccattttcttttatccgtttttgagtttgcgaaaaaccagccgggaaatgtgtttcaaaaagaggactggctggacttttcaccggagaacggcacctggttttaccggttgtatgagcgtgatacagataatggaaagaatatgcgccgtgctgtggaccggctctttcgcatggaccaggaaaagcgggaagaaatttacgaagcagtgaaacatgatatggaattcatggacaaaaaggcctgggaaaagggaaaattcaacctggaaagtgaccagcttcctgaagcggctcagaagatactccgggattttttcgggtatttttatgatgtggtcctgtgtaccacccattttcgtttagaagggatgtcacggcctttttacagcaggaaagagctggcaaaggactattttaagggaaagaatgaaaagatccgcaggatctgtcctgtgtgcttacagccggtaacgaatggggaaacagacgaggatgtggaacattattttccaaaatccaagtatccctgcttaagtctccatccctataatctgtatttttgctgtaccacctgcaatacccgttttaagggtacgaaaagcccgttaaagggaaaaacaagggatattggacggatctttctgccgtatttggatacagtaaaagatgccgtgcagctgaaatttgaaaatcccggggataaggacagcgaagtggtaaaaatgcttccaaagggagatactgtgccggagacgaaagagaagatccgggaatttgaccgcttatttgccctggaggagcgctggagcggacagctggaatgttattatatgtccctttatcagcggtatcaggaaaaatatggggatggggaaatgagcctggagaaactgaaagaatacctggaagaagatataaagaggaaccagatcatccagaactggcagccgggaagatacctggaaggggagtatatgaaatggatcgcaaataaacagcttaaagctttttatgaggaactgaaaaaataggatctattttgatcatcatgataaccaataaaaagaacgcctggcgttcctataatagttccaaggaggaaactttggagaataggaaaaccaggcgttctgttatgggggcttttgtttttataattctttgccagtcagcatcttgtagctctgcagatatttatcaatggtcttctgaacgatctcttccggcagtgtccagtcatttcccggatgggaagtcagccagtcgcgggcaaactgcttgtcaaaggatggctgggaatgacctggttcgtagccttctgccggccagaaacgggagctgtcaggagtaagcatttcatcgcctaaaacgatatttccttcttcatccagaccaaactcaaacttggtatcagcaatgatgatgcccttacttaaagcgtagtcagcacatttcttgtaaagagcgatggtgtagtcgcgcagtttggtagcgtattcttttccctttcccgggaagtgtttctccaggtggtcaatgctctgctcgtaggagatattttcatcgtgatcaccgatctcagccttggtagaaggtgtgaagatcggttcaggcagtttatcagattcctttaagccttcaggaagcttgatgccgcatacagtaccgttttccttgtagctcttccagccgcttcctgtgatataaccgcggacgatgcactccagaggaagcatgttcagcttgcggcacatcatgctcttgccttcgtattcaggagtctggaaaaattcaggcatatcttttacgtcagtagagatcatgtggtttggaagaatgtcctttgtgtagtcaaaccagaatttagacatctgggtcagaaccgtacctttcttggtaacagtattatggagaatcacatcaaagcagctgatgcggtcggtagcgaccatgatcaggctatcgccgttgtcatagatctcacgtacttttccttctttaactggcttcatctttctacctcacaatgtttgaattttaattaaatgggatttttttgttatctacctatagaatatacgtaaaaattttcaaaaatcaatagtataattaatttttgtgaaaaatgacgtatgatatataagtaatactaattaaaaatcattattcaaaaaggtaaaaaagaaaaaatccgctctgccagccgtcttgcggggatagaagtgaccagttccaggacgacacagaccattccggcggacatgagcaggtggttgatgagcccttgggaagaacagaaccccagggaaaagccacgcttcataggccagatcagtcgcagacgcctgtaatttaacagatccagtgccagatgggaagcgtaggcaacggcaaaataaggggcggcatccgggtagatcacatctatgcatgccgtgagcatgaacagggataaaaaggaatgcataaaggagcggtggggctgcgacgagccgtaggtgcagatgatgataaatgccatggcgccggtgagaagtctggcaatactgctgtttcgcatcaggcgttcataaatgcccacatgaaatttataatctgccaaaatgacgatggcggtaacagcaatggctgctgtcatgatcttgtcagcctctctgtgggcctgagaggttccggagtcgatatcgctgatcatgccgccaatagcagcagcccccgcaccagctactaaagtaggcatggaggagggctgcatcactgccaaagcagcagatataccaatgaaaaaatgtgttcttccaagcatgttaaaataggatccttatctaagtgttttatttacaattatccccaatttttgggatatcttcgattgtatcctatctatgcctgaaaatcaaatgacatttctcttaagaatcattatgtaagtaatgtgttgttatcataatcaatatttattgtatgagcattcctgtgccgaaactgtaaaacaggatacaccatggttttgccagaaggatgataaggacaaatttcttcactgacatattaataaggccggaaaagtagcataagtagtcatccggtgccaatggcaaaagaatggaaagagcgaaaagcacatcatagcttctggctctcttgatccgctctgtccatacattatattttttggatggaaacatggcctgcaccagggggataccaaaatgttttgcaaggaaaaatgcgatgatcgagccggcgcagatccccacataattataaacaaatccgcatacactgccaaaaagcaaagcaccggctacgcagccgataaatcccggcagcaccggcacaactacctgaaacgcctgtataaacacaaacacaaaaggcgcaaacagcccaaacccacgtatgtaagcctgaaatgcatcaacagaccggaaattgcctttaagccctgcctggagcataaacagacacaaaaggatgctgatggcaatagcgctgtaagtcagccatttatataaaacagatgctttcactgttaagacctcctttgtattacccacgaaccccgtgcttacgcgttccactgcctgcttttgcaggcggttcgttcagtggctattaaatcacaatatagaataattgtgaaggaagtttgaacataagcttaaaaatggtataatcccgtattacaaaattaaaagtcatcatattgatgacaaaataccaataaaaaatcatcaaaatgattatttttattgaaacaaggaaaaataatactataataaaaatagagataaaggtgtggagaagggcgaatatggatgaaaaaaagtttgcaataaaagaaacagtgagcgcagaagaggtaaaaatgctgcgcaaaaaattaggcttgacccagagagattttgcgggactgttgggttgctccaagccgactgtggaacgtctggagcgtgaagggactgttacgaaaggtcctatggcgcttttgatgaagttattggaccgggatgcggaatatatacagacacttatgatcccacccagagaactgccggttcgtatatggtacatgtataaggatacgccatgtaccctgattgatgtggatgaaatgcaaaaaattgttcacattcgtaattatgtagataatatccagtttagggcatttgggatcaaggaaaatccaaccattgaggattataatgaatttttggaatcaagatgcttccctagaacgagagataagatgaaactggtgttaagagatcttggaatcccattttatgatccatacctgatcattcagaaaacagagggaagaatggcagaggacgatttttggatcaggatcgagcgataggaggaatggcgatgattgagttatttgaacaaaatgaacgaatgcaggaccgtcagtcctcaaaaggaaatcagttgaaatgggaaaatgcaggaatttggtataaagcggattatactggatatgaagggttggcagagtatatgatctctcatttactgataaaatctacattaaaaccagaagagtttgtgcgatatgatctggaagaaattaagtataagcgtcaggtctatcagggagtaaaaagccgtacttttttatcagaggactggcagatcataactttggagcggttgtttcaaaaaatgtatggaaatagtttgaaccaaatgctttggaagatggatgatgcagagcagaggttgcggtttctggaagaacaggtagagcggatgactggtttaagaggatttggcatttatctgaataaattacttacaatcgatgcaattttcctaaatgaggacagacatacccataatattgctgttttaatgaatggagcaggaatgtttaaatattgcccgatctttgataatggaggcgggctgctgtcggatacaatactggattatccattaggagaagatacttttgatcttatggaaactgtttgggcaaaaacggtgagtactgattttgatgagcagttagatgtttcggaacacttgtatggatgcaatttaaagtttttctttacaaagcgggatgtggatcagttgttggaacaggcaaagggatattcagatgaggtgcgggaacgtgtacagacgatcctgcatcgacagattgataaatacgcatatttaaaaatgtagtaaatcgcaactgactaaaaatctcccggcatatcttctaaattaagatataccgggaggtttgattacacctcatgataaaactcacgtatcataggataaatggtcttatatttctcataaacaggtttataggcttttacagcatccgggtccggttccagtacggtgcagccgcctttttcctctaatacatggataaaggactggtaatccgggataatgttttcggccaggaaaacgcttgatgcaatggcaagtgcgggcagtaggtccgggtccttgtagacgtggacgggaaggcccattacattgcttaagatctggcaccaggcaagttctctggctccgccgccgatgatggaaagctttaccgccggagcgttaaacagctctaagccgtgtcggatggaaaatgccaccccctctaatacgcttccagccatgtctgtggcagaggtatcctggcttaagccaaggaaagaagcgcggatatggctgtccataatagggaaacgttcaccggtcagatagggcaggaaaaagacaccatggcttccgggaacatggttttttaaaaggtgggagatataggcgaaatccggtttatggtccagctcgcgggataagatccgggcaataaagcggtgtacatttccgccgtttaaaaatggtactacattaatatataagtctttttgcatggcagccaggttaaaaccgccgccttcactgtccatacggccttttgatacagctgccacccagctggaagtacccaggtttacattgtattcgccaggggctaagataccactggcaagagtggtagccccggcatctccggtgcctgcgtagacttttgttccgggcagatagccggtatcagcagctcccttttctgctattacgcctgcaagttcatgggaatggagcagttttggaaatttgtttatatccagtccggcatcgtttataaggtgctcagaccatgttttatgttccagatccatagctcccgcagtagcgcaggccgtcatatcaccaatgaaattcccggtcagtcttgccactacatagtctttggaactgatgagaaaagcagctgctttttcatagatctccggctgattttcctttaaccacaagatctttgccagaggcatggaaccgtcaaaatggtttcctgtaatagcggtaatagtatcgctgccaactgcattttcaatggcttctgcctgtgcgccagcccgtccgtcagagtagagaatggcatttcccaaagatcttaagtcacttccaactggtatcacatcctgcatctgaccggaaaaaataagagcggaaatgtctttggccgatattttatctgtaagagcatgggataaggcgcagaaagcactgtaccattcttccgggttctgttccttaaaaccatttttttctatagtatggatcacctggcttcctgtaaaaaacggttctccatcgtcacgtacagctaccgcctttactgcggtagttccaatgtcaaaggttgcaactaacataattttaccccctaagtcaattctttccggcccctattttctggatcacaactgccagtataatgataccgccggtaatgatattctgcataaagcttggcatctgcaaaatggtcagaccgttggctaaaaccgccagaactgctgcgccgatcagcgttcccacgacacagggaacaccgcttttagatacagtgcagccgataaatacggctgcataagactggagaaaatagccttgtcctgcagtagtgttggcagagccaactctggaagccaccagagcacctgcgagacctgcaatcgcgccacacagggaaaatgccagtacccggtagcggaaaataggaattcctgctacttcagccgcttccttgctgccgccgatggcatacagcttccggcccggagcagtatgtcccatgaaaacataaaatgccaggtataaaacaattgccaccaaagtaataaagggaatacctgcgatctttaaaataccgggaatggtaaatgcctttggaataccattaaatacggtagtaccgccggtgagcccgtagatcacaccgtctaatacagttcccataccaagagtagtaataaaagataaaatctggaagcgggcaactacaataccatttacgcagccaaccaaaaggcagatcacagcagcaatcaggaaacaaagagccacaggaacctgtttaatggataacagggcagcgatcacgcccccaaggcttacaatatttccaatggataagtcaaattcattgatggtcattacaaaagtagctcctaaagccaccatagccaatggtgctgcctgtctgctgatgttaagaaagtttttaactgtgcagaaagaggccgggcggagaatagaaaaaataaggatgatcaccgccagtgcagctacggttccataatgtttaaatgctttcattttcatgtgtttcctctctttctgcttcataacagcaggccagtatgtccgctggctttaaattcttatttggaaagatcttacgtattttcccggatgccatgaccgcgatctcatcagctacctccaaaagttctgtaaggtccgatgaaacgtagagaacagctttgttttctgccgcctgatggtgcagcagactgtggatctgctgtctggtggcaacatctacggcctgtgtaggttcatcgcacaaccatatggagggggatgtaagtaatgcttttgcaaagaccaccttctgctggttgccaccggataattcacaggccggctgggaagtgccggtgcagcggatctttagggcgtttatcataccttttgcagcagaaacagcagctgttgttgaaaacagcccctttttggaataatggtcaatggaagaaaggttcatattttcttccactgtaaaagacgggatcatggctttgcgccgcctgtcttcgcagataaaggcgatgcccttttttatggaattaacaggagtgggctttttcaccttttccccactgatctcaatggttccgccggatatgcgccggatgccgtagatacattccagaaattccgtccgtccgctgccgcaaagaccgaacatgccggtgatgcgtccggtgtggactgtgatactggcgtcttttacaatgtggtcggcagaggaaaggtgggagatggtgagtgcagggaatgattgtgtggctgccgaccgggaacaacatgtactgtcaggcatcatgtgtttactatccgcttccccattcccgctcatcagccggaccagctccttctggctggtagaggcagtatcgcaggtacttaccagttctccgtttctcagcactgttacccggtccgtcagcgccatgatctcttccagcctgtgggttacataaaggacagcagttccttttgctttcaggttccttataatagagaatagtaaattcgtttccttatcagaaagagaagcagtaggctcatctaagatcattaacttacagtcgctcatcatggcccgcaggatctctacgcatttcttctgtgccggagtcatctggaaaatggatttcttcaggtctaaatggatcccaagttcttccccttttttctgagccgctttttccatttccttccactggatcagaccgccttttcggggataaggccgtccaagccagatattttccagggcggaaaatgcaggtatcagcacatgatcctggaaaatgatattgatgcccagttcccggctctctaccgggccgaaatcagcaggaaaaggagctccgttccaggacagctcccctccgttttttgtatacacgccgcctaagatcttaatgaacgtagactttccagcgccattttcacctaccaggccgtggatctccccttcttttaaagagagatccagacccttaagggcatatacaccattaaatgatttgtccagtttctttgcttctaacagcattcttgccacctgccattttccatgatctgatcctaatctgtatcagcctaaattcccgggccccgcctggagcccctgggaaattcgttctgttactgtgcgttttcctgagtaataagctctgcaggagcgtacatttcacctttttcaatggtctctcctgcataatatttttccatctgccggcagacaatgtcagccatgccttcaaaattctgctttacagttgcttttaagcaggaaccgtctttgatcatctgtactgcctgctcatttccgtcaacaccggtaacaataacttcgtcacgtcctgcttctgccaatgcctttgcggcaccgatggccggttcatcccatgctgcgaaaatagcagttacagagtccttgtcagggtttgcggttagcaggttagcagtgatctcttctgcgtcattaataggctgttcagccggtacatgctgttctgtgatcagctgaatgtcaggatattctttaataatgtcatcaaatgcttcacaacgttttacaacacctggatgtggtctgtgggtgagagcaatcacagtacctttaccgcccatcaggtcatcaaagaggtaacggacgatcagttcgcccatctggtagttgtcgctggtagcattgacctgcattccatcaataaaaccgctgtcgcagccgaatacagggatatctgcgtcaaaggcttctgtcagctgattggcaacctggtttgggtcagcacttactaaaacaatgccgtcagtgccggaagaaaccacatcttcaatacggcttgcaagctctgcaaaatcattggcagtatcgatcacgaatacttctgcgccttctgcctctaagttattcttgataaagccagccatctggttggtggtaacagaagtaagatatggggtcataacggagatctttttaccggcaagagcagtactgtcggcagtttttgtgtcagctttgccggaagcggcatcttcagaagctttttcggtagtggaagcagcttctgtctgtgcagcagtctcagcctttggggcagttgtttcatctgcttctgtagagcagcctgtaagcaggatgccggtcagcgctgcagctacagccagggttaagaaattacgcatttttttcatagtgttctcctcctgaaataaaatttttgtttgttggggaataaatctgggaataaaaaatcccggacatgacttttacatcatgtccgggacgaattgttcgtggtgccacccgaattcacagatcttgtttaacatcagggttccaaaatcacaaatcctcttacaagcaagcttgtatcggatttttgacttttgaaccctgatgttaacaaaaatagcagctatcccataatcggaatatctgccaccaatctgtctcattttcagagtacggaaagtaaaaaataaaacttcgatactcttatcctttaacgcaggaatcacggcctcagctacttgctattgcgttcacctggcgtctcacaaacccattccataaggaactccatactgctttccaccaccagcagctctctgtgatatcattccagatgtactctctttgctcatcgacgttacttttaaattttatggtaataaagtagcacaatttatattgactgtcaattataaatttaaggatttttaagtttgatttataaatggatttcaaaaggttttctaaagattgccggattgcattgaccgaatggttgctatgctgtaacatggtagtaacggagaagcaagttcgatccgcaaaaataaaaaacggaggaacattagatgacaagagcagaactgaaacggaacgcaagggagaaacttgggggacagctgttcgggcctaactgggtcaatgcagtccttgtaatggccattttttatatactgacgggagccgtaaacggtatcgcaggatttggaaccctgatcatgttagtgatcggaggccctttaagctacggagtggcaaagctgtttttacagcagtgtgatgacggacagaaaatgaacccgacagaagtatttaagggcttttcagaagactttggcggaagctttatcttatatctgttaagataccttttcattgccttatggtccattttgctgatcattccgggcattgtaaaaatgtattcttactccatggcattttttataaaagcagatcatccatcatatgactggagagaatgcttagatgccagcagccagctgacatatggacacaaatgggaactgtttattctggatctgagttttattggctggcagatcgttggaagcttgtgtctgggtattggaactttctgggtaaacgcttacagagaggctaccattgcggaatactacagatattatgaaagcaatcaggtgatcgacagagatttttaaaatataatatttcataaacagatcaaagggcacctcacagcgaggtgccctttttaagcggatcatttcggatcatttttaattactgctgagccttatactgctctaaagcggttgccagctggtcaggacaggaagttgggcgagggccgcacttgatgcctttcatacgtttgatggcttcatcgatatccattccttcaaccagtgctgcaacgccctgtgtattgccggagcagccgcctacaaaatgaacattggttaccttattgtcttttacttcaaaagaaatagctcttgaacagacgccgtgggttgtataattcatcacatgtacctccttggggtttagttttgtaaataagtatggcagcagaaaagtatgccgcccggttcttgacgggcagaagccaaactgttaccatgtatctgtgtacatttttatttgtacacatgtataacgttacggttcatgttgttgcatgaccagcaacagtgtacctttcattatgcttcatgtaaataagattgtcaagttggaggaaaagaatgatcggaattatcggggccatggatgaagaagtggcaatgttaaaggaaaaactcacagaggttcaggtagaaacaaaggctgctatggacttttataaaggaaaattagagggaaaggacgtagtagttgtccgttccggtatcggtaaggtaaatgcagctatgtgtgcacagatcctggcagatgtataccatgcagaccatgtgatcaacactggtattgcaggttccttaaaggcagagatcaacattggggatatcgtgctgtctacagatgcattacagcatgatatggatgcccaggcatttggctatgagccaggacagatcccaagagtagacacactttcttttaaggcagatgagaaaatgatcgctcttgcaaaagagtgctgcgaaaaagtaaacccggagatcggcgtatttacaggaagagttgtttccggagaccagttcatttctgataaagagaagaagaaatggcttactgatacttttgcaggctactgcacagaaatggaaggtgcagctattgcccaggtatgctattttaaccatattccattccttattgtaagagcgatttctgataaggcagatgacagtgcttctatggattacccgacttttgaggcacaggccatccgccacagtgtgaacttaatggcagagatgctccgctgtttttaatacaagatgatccacagccagttatcaatgtcttttaaaccctgttcagaatcgtttcgtgggagaatttgacgaacgattttaagggttctcaacttcccaaataaaaagccgtcgttataattaagcttaccgaatgacacaggcctgcaggtgtgtcggccggaataatcattctgcaataaaaataataacatttgcagacagtggaaacagaaaggggagcttatattatgatgggctttttacagacgggaagagcactgtatgtgctggcagttatctgctttggaggtatttttgtacggctggcagccggaagcttctacaaaaaactgataaaagaaagcgcaaatatggcgctgaccaagaaccggtatctgcggaacttaaaacagaatgcagaagatacatatagaattaacatgggcatgaacaatgctgctgtttatttacagaggcagcttggaaatcttaaatttttaggtttttctttatcgggacttgaaaatctggcaggccagctgactctgctcagttttctggcaggcggtgtatgcgcttttctttcctattggaaccgcagtgacaattcttacattgtcctttacggagcagcgggaatccttggcgggatgcttacgatcgtggctgattatggtgtaaatctggaaggaaagagaaaccagcttctcatcagccttcaggatcatctggaaaatgtaatgtggccaagactggagagggaaagcagcagcgagcgtgcaagtgcagttacagaggccgaagaacggcgtgatggtggaactgtgcggaccattggaagggaccgggatcgtcggttgtctggtgcaagaaggggcgcagagcagacggcagccagcagggaaaatgcccgtgaggcatcaaaccgggataaaaaagaggaccggtcggccaaagactggctggatgacttaaatccggagcagaaacggatgcttggggagatgctgaaggagtttctgtaaataaaagcctgtggtttgaaggcggtgttaaaaacagcgtttgaaaacagtcgtagaaaatcagcgcaggttatggaattgacaacacaaatatgctatactaaaaattagttgggaaaattttcacaaatctcacaagtatgcaatcagaaaaggagagcgggaacatgggtaaggaagttgtattcgattattcaaaagccaccggttttatctcagctgaagagatggctaacttcaaaaaaacagttatgacagcaaaggagactttgttaagcaaagaaggtgctggaaacgactatcttggttggatcgatcttccagttgattatgataaggatgagtttgcaagaattaaaaaggcagcagcaaagatccagagcgattcagatgttctgctggtagtaggaattggcggttcctatttaggagcaagagcagccatcgaatttttaagcaacagcttttataacgtgctgtctaaggatgtgcgcaagactcctgagatctattttgtaggaaacagcatcagcagcaaatatattgcagaccttaagaaagttctggctggaaaggatttctccatcaatatcatttccaagtccggtacaaccacagagccagctatcgcattccgtgtatttaaggaaatgctgatcgaaaagtatggcaaagaagaggctgcaaagcgtatctacgcaaccacagaccgtgcaaagggtgctttaaagaacctggcagacgaagaaggctatgaagaattcgtagttccggatgatgtaggcggacgtttctccgttcttacagcagtaggtctgcttccaatcgctgtatgcggtgccgatattgacaagctgatggaaggtgctgcttccggacgtaagaaagcactggaaactccttacgaagaaaacccggctcttctgtatgcagcagtccgcaacatcctgcttcgcaagggcaaagcagtagagatcgtagcaaattatgagccaagccttcactatgtatctgagtggtggaagcagctgtttggcgaaagcgaaggaaaagaccagagaggtatcttccctgcagcagtagatctgaccacagacctgcactccatgggacagtttatccaggacggcgcacgcatcatgtttgagactgttatcaacgtagaagaatctccggaagagatcgttttaaagaaagaggatgtagacaccgacggcatgaactatcttgctggaaagactgtagatttcgtaaataagagcgctatgaacggaaccattctggctcacacagacggaaatgtaccaaacctgatggttaaggtaccagagcagaatgaattctatttaggtgaattattctacttctttgagtttgcctgtggcgtaagcggctacattttaggaattaatccatttaaccagccaggcgtagaaagctacaagaagaacatgtttgctctccttggaaagccaggctatgaagctcagagagaagagctgttaaagagactgtaaaatataataaaaagcaagaaaaaagttccagc

SEQ ID NO: 3537 - DNA, 20398 bp, Unknown
  gut microbiota DNA sequence
actaagacaaaagctacgctgtaataacaagaggtgagtgctaattttttataaaaaacttccacaccgagctggtcacggaacagctcataatcaatggataaatcaaaccatcgagaagttttatcctctgctgatttggtcgtttcaatcaatacgctacattcttccatcgtaattcagtcctttcttctgattttgagtatgaaaaaagcagtcgatcataacggaaagactgctttaaaccatatcctttattgctttgtgtggagatttaactgattgtctatgtcccgtccggcatacattactctaagaaaagcaatatattcaaaaattcctctcaaatcactgtcagcctgttcggatacttctatttcatatatcataagccataatccttgcgaatgtcagcacaatagcaatactaattttatgctccaataatcttattgaatatgttcacatataataatgaggtcacattccatgacctcatcactttcattttttccagatctgccattattcggctatactctgttccagcggcatagaggccagaaatgacagttctttcttttcagctattcccagataaatgattgcaaatacaactgttactgtttcactgatgagaaagctccaccatattccattgattcccatcatcttacccataattgatgcaagtggaagcaaaatgatcacctgccttagcgcggaaattaaaagactggctattcctcttgaaaagccctgtaaagcatagcaggtcataacagaaattcctccaaacacaaaactaagtcccaaaatacgcaatgcagtcacacccagtaaaaacatttcttctgatggtgcaaatgctgatattaactgtatcggcagcatctccattatgatcaaaccaaccagtccgatcaaagcagaatacgccccgctaagccggataactttcttaatccgttctgcatgttttgcgccaatgttaaatgctacgatcgggatcaaagcattatttaatccaaaaactgccatatacacaaatgtctgtaatttaaaatatgctccaaatactgctgtcgaagttgttgaaaaatccagaagaagtttgttaatgccaaaacacataacgctggacatagattgcataataatcgttggaattccaacagtgcaaatccccttaaaataatagctttctaatttaatgcatttaaaatcaaactgcacatctgtatttttagtcagattaaaatataatcccaacagcattgctatgatctgacctgccactgtagcaattgccgcacctctggttcccattgccggcaaaccgaaatatccaaaaataaagatgggatctaaaataatgttgatgaccgcaccaacgatctgcattacttaacattaattaatcctggatcattcatatgcaaaaccataaataatccaggatcatctatactttttatttactgcattctatgataattgcttcacacttatcatatccaatctctgaactgttcagacacaacgtataattgctggcttttccccagttctgctccgtataaaagttgtaatttgccatacgtcttttatctgtgtctgccatcattttaacagcttcctgctctcctacattgtataaacgggtgatacgctgtattttttccggcatatccccatgaataaatacattcagcacatcgtcccggtctttcaggataaaatcagcatttcttccaatgatcacgcagggctccttcccagccagatctaaaataacttttctctgtgcctcatacaccatatcttccactgattttcctgtaatatcacgtcctacaagtgcatatgcaaataatcctttcttcggagacagctctgctttttcctggatataatccggagacagacctgactcttctgcaatatgattaatgatgtttttatcataataggctattcccagtttctttgctacttcttcaccgataaaacgtccaccgcttccaaattccctgctgatcgtaatgattttttttgccatttccagttcctccttaaattaaagtattaactctgttttttctgattttctttaaaaatacatatccagccagacatgcgatcacttcagtgaccggaaatgcccaccagatcagtgaaattcccatctggccatttctgacaaataatgaaaagattcccgccaatggcaatatgataataagctgtctcaaaagtgaaataaccagtgattccaagccgccatctaatgcctgataaatcccctgataagcaacgttaattccggcaaacagaaagctgacagagatcactctcattgcaccgataaaatattctcttgactgtcctgcattaaacaaagttgcaaatgccccagggaaaatctctgtgatcccaattcccaggatcattaatgcaatagtatagatcaggccatatttgatcccatcctgaattctctttttatttctcattccatatgcaaatgcaatgatgggagtgatcgcatccctcaggccaaaggcaaggaagagaacgaactgctgaaccttatagaacaatccataagctgtctgtgctgacggattgaatttcaggatcagattcatcacataaaccataatggacatcaatgcctgcgcaataattgcaggaagtccgattgcatagatttcttttataacaccggcatccggcttcatgtatttcactccatgcccgaattccttattcagccttatatgaaatataagcagcaatactgctgatgctacctggccaattacagttgcgtaggccgcaccttccactcccatttcgggacaaggtccaataccatagatcatgaccggatcaaggataatatttacaacagctccaactacctggccaattgttgaataaagggaacggcccgttgcctgtaataacttttcaaataaagaaaagaaaataataccaaaagagatcacgcagcatatcctcagataactgactcccatttccaatacttctgcatcaactgtctgtgatgaaatatatgctctcacaccaaagatgccaaacaataaacataccacataaatgatcacaccaagaaacaggctgtttcctgctacctttgcagcctttttactgttcccctgtcccagtgtccttgcaagaagcgcatttgttcctacacctgttccgatccccactgccaccataagcatctgcaccggaaataccaatgtcagtgcatttaatgctgcttcactgcccactctcatatttcctacaaatgcactgtctacaatgttatagaccgcctgcaatgccatggataagatcatagggatccccatctggatcatcagcttattcaccggcatatctttcatcttgttactttctgccattttgttttaactcctctctttttggcacaaaaaaagtgcgcaccttgtcatataagctggacttacgctgacaagctacacactttttcatggcaaatattctattttaataaaataaaaacgagcagcatgtaaactggatttacgctcacctgctactcgttcgttgtaattatatttcctgtttttcaaaaagtcaaacaaaatttttctggcattttctcttttatgaaccatttatgataatgtcctaatataccacaaggaaaacgatatcactgtaagtcatcccatcggatttatataataaaatttggcacgatccacataccagtcttttcaaacatattataagcagaaataccgcatgccaccgcctataaggataagcactaccggcaaactcccccataacgatcaggcggtctggtgaaattcaggcatttacctgtatatttacataatactttccataaaccgctggatccggtccatcccccggttaatctgctccatggatgttgcataggaaagacgcacatatccttcgccctgttctccaaatgctgatccgggagctgttacaacgccttctttctccagaagtttctcgcaaaattccacagaagtcatccctgtttctttaatatttacaaatgcataaaaggctccgtttggcggtgtacaggataaacctttgatgccattgatccgctccagaacaagttttcttctttctgcatactgtctgttcatcattgcaatatcttcatcgccattttttaacgcttcaattcctgcatactgtacaaactcaggaagacaggaaggcatattttcctgcaactttggcagtctggaaaggatatttcttggtcccgccatatatccaagacgccagcctgtcatggcatatgttttagaaaaagaatctacataaatagtgcgttctctcattccatctaaaactgcaatattaatataatctgtatcattatagataagatgtttatatacagcatcatagatcacataaagatcatattctaaagctacttttgcaacggtctccatggtttcccttgttgcaacgccccccgtaggattgcagggagaattaaggataatggctttggttttatctgtcactctacttttaagattttcataagtaaagttaaaattatccttttcatacacaggtacaggtactgcaactgcacggttcatcacaatctcacctacataattggtataagacggatctgcgatcaggatctcatccccaggattaacaagggcaagaatcgccatatacattcccatcattccgcctaccgtcactacgatctcaccttctggatcgtaatctaccttgtcatactgttttaaagctctggaaatttcctggcgcagcggcaaaatgcctgcattatccgtataatgggtacacccttcatccagttttttctttgcagcttcaataatgtgctttggtgtcacaaaatctggctcaccaagaacaaaacttacagtatcttttttattttttgccaggtcatacattcttctgattcctgactgcggcagatctaaaaaactgcttgttgtcttcattttgtctcccctccgtttgttagaaataccttctcgagcaagtataccttttcgtttttctatcgacttcttaactgtaacatagtcttgttgtgaatggaattgctatatattcatattaagttgaacaaaattcaccattcttatttacatttgtttgtgcaggaattataatttttaacagggaggggattactatgacattatctgattacattatttttacaactgtttccgaactgaaaaatatgagcctggcttctgataagctttacctgaccaggtctgctatcagccatgccatttcccgcatagaacgtgagataggctttccattattcataaaaaatacacatgggatcgaacttacagacaacggagctgcccttcttccccttgcatatgctgttatacaaaaccaccagcatttcaatgaaaaaatcgctgcgatcaatggtctggcctctggcaatgtccgccttggaacctgctccagtatctgtattaactggatccctgaacttgtgaataatttccggcatcattatcctgacatacagatccatatatttgcaggtattaataatgcccagatcgtaaaaaaactggagcaaaatgagatcgatattggtattagttcttactactcttgtgatactatcagttcctctgccatcagttctaccgtcatctatgaagatgaaatggtttgtgtggcaaattctgattttcacacaagtacgcccgggatcattactgcagaggaactgcaaaattctgctttcattatcagcgatcaggactatggtgtagaatcccgcagtgttcttgaaaaacttcacttaaatgcaaattccactattacagccactgacgatgccggactggttgcaatggcatctgcgggtttaggattttgtattttaggacgcctggtattaaaaggaacaacctccccggtaaatgtctactcttttcatccacgacaattccgccatattgctttgctgcaaaagaagaatgtagccctttctcctgctgcagaaattttccagaaacatattataagctatgcctcttcctatccaaatccggcaattccattcaacttttgatgaaaaatgttcaatggtcctgtatctgacaggtacttgtaaaaaaatcacctgctccgtataatgaatgtaaagcaattaccaacagatcgttcctgagatcttggcaaaaaggggtagcaaaatgcagataaaacaagaaaatgacggacacgccgtcattgatcagctgactggagaagaagtattgacctgcgccattaatattggagaacaacttttaatgagtggtgcagaaatcagccgtgtagaagatacgatacgcaggatctgtgcaacttacgatatcaggcaaagccatatattttccattgcatcctgcatcatcgtgacattagaaacaaaagatcataaatggatcacccagacccggcggatattaagctatggaacagatatgtggaagctggaccggttaaataatctttcccggctgatatgttcaacaaaaccaccattagaaaggatcaaccgggaatatgcacttatattaaacgggccggtctatcctcctgtggtccaatgccttatctacgcaatgacagccggtgcatttgcgatcttctttggcggaaatctattggacggtttttctgccatgtttgtgggggcactgatccggataacattgtacgcatttaccgcaataaaaatgaaacccattttttctaatatcctgtgttccatgatctccggtatggtatgtatccttacccactatatcggtctcggacatcatgtagaaatgatcatgatcggaaatatcatgcttttaattcccggtgtcctgatgacaaactctttccgtgatttcatcagtggcgatatgatcagcggacttttacacttttcagaagcgatcatcactgccatctgcattgctgctggatttattttttcaaaaatactgcttggaggtatcttatgaatcaggaacttatctctgtcatttcagcatttttcggttctctgggattttctatcatctacaacatcagaggactgcggatctggatcccggcaattggaggtgctgttttctgggctgtgtatctgatattccttcattttataaataatgaatttttaggttttttctttgtggcaatcctgatcacaatttattcagaaatatgggcaagaatattaaaaacaccttccaccgttattttaatgcccacagttattccactgatccccggcggatcactatactatgcaatggatgccgctctccggcatgatatgccacaatttttcttaaaagcccaggctgctgtcggacttgctgtggcacttgcagcaggtatcatggccgtaacctccatgcagcatttaatatcggcgcttataaaaatgattaaaccagccccatgaccggaaaattaccggaaaaccttccaaaaaactatcctatttattcaaaaactcttccacaatggctacaaacacagcagaaccttcccaaagcacatcttcatctacatcaaactttggattgtggtgggaaacatcggttccctttgccgggttggaggagcttaagaacatgaatgctcctggcagtttttccagatagtaagcgaagtcttcaccacccatgtttggagcctttacttcggtgatcacatgatcttcgcctgcaacagtctttgccgcttttgctgccagagctgccatcttgtcatcgttgatcacaggcggtgcgccccagatcatctcataatctacatttccgccaaatacagcagccgttgcctgggcgatctctccgatgcgctttgctgcaaactggcgtacttcttcttccagtgtacggatggttccttcgatcacaacctcatttggaataacattatactggcttccaccctggatctttcctatggtcagtaccagtggctttgttgcatttaattcccgggtggtaatagcctggagagcgatcacaatgtgcgctgcaatattcaccggatcaatacccttttcaggtgtagaaccatggcagcctctgccatttaccttgatcacaaacttatcaaaagcagccatgcagcagcctggcgttactacaacggttcctgttgggattgctttatcgataatggttccaatatgggtgccaaatacagcgtctgcaccttctactccgccattttcaatcattacttccgcacctctggactgttcctcagaagtctggaacataagacgtaccgtacctgcgatctcatccttatgagcccacagaacttttcctgcacctaacagcatagctgtatgggtatcatggccgcaggcatgcataaaaccttcatgtctggaagcaaatggaagtcctgtctcttctttgataggaagagcatccatatctgcgcgcaggcagatggtctttcccggctttccgcctttaatagtagcaataatcccgctgtcctttttagagcatatataagggatacctatcttatccagctctgctgttacataggcagctgtttccggcagatgcaagccaagctccgggatctgatgcagatctcttctcaatcctacgatatattcctgtaaatctttacattcattccacatagttatgcaatctcctctcccactggggtctcatttattttttctgcttttgcagtgtcatctgcatttccatcttttttcttgtcacttacatagaacagacgtgccattccaagagtgccaaatacggcacatacgatcaccagccatgcaggtaccggtacaaacagcttcaatacagttgggatcagcaggccaaatacggctactttcgggtattttactgcgaagtttccaaaagttccgccgaaaattgcagctgctgcatagttttttaatgcagagtttaaaaatgcaggaagaacagctacgactgcagaaccaactaaaacagcgcctgtggttgcgatcaggtttgtgataatggaaccgcagatcgccatggtggaaactacttctgcctggatggttccgctcttgctgtcagttacatccagtgccagtgctgcacatggaacacgcatatttccaatgtttccggaaaggaaacctaagtatgtaccactcataccaagagctgcatagtaggaaatcggctcaacaatatagaatgcgccaaaggataatgctgtcagtgcccatgctgccaggactgtttcaagctttggccagcagccatagcggctgcacaggtataataccgggataaatgcagtgaacgcagccatgatacaggttggtgcgccaatgcggatactgtttctcttccattctgccatataatctttcataatctgtcttcccctcctatgctactgccaggtcgtgcattactgcaaagaacattccaatgaccattgcgatacctaaggaatattcagctaattttggatgctttggcacgatcagtttcatgatggctaccatgcttaatgcacctgccagacaggcaatagtgcttccaagaccttttttgatctcatttgcatttaagtaaccgaaaataccaagggaacatgctcctgataaaacagccagccactttgcgtcgccgccgcttaacttgcctcttaatttctctaatgccggtgtaactgtaccgctgactaacagccatccagcaccatttaacgccattgcaaaccaggatactgccataacggtcagtgtgtatccgtttcctccaaattcaacacctgctgcctgagcacccatggttgctgcagaaagctctgtagctgccgcgccgataatggaaagacgaagccatgccattggtccgccaatagatgccataagaccaaccataacaataaatacgccacaggccgggccgatggctgagatcagaccgatcttaaaagccttgtttgccagtccctgttccagatttacctcaaccgctgctcttttcgcctgacgcataaacagaagtgcctgtgccagagagatcacaactgtgataccgcacagtgcccagaagataggggcatttgcaattgccagatagtccatagattttcctcctctaatatccttcaacctttttcactggtcatcttgtatgttgtggaccattatagcattgagatttttggaaatcattgtacttgaaggacaacaattttcaattagaattgtgtgaggtgttttttattgtatgtgagggatagtttggggcttgttttatttgtatctgaaggacaatagatagtgcattcggggtgtatctttgctataataaaagggtgaagccatataacatatacaacagaaaggaccttcccatgaccatatccgattttttaaaactccctaatttcactgacctgcgcctgttagcaggcaaatacgggcttttaagtgaagtgaccaatgttactgtagtcgatacaccagacggcaccaactggttaaacggcggggaactggtgatcactacggcatatatgcttcatgaggaaaaggaccttttggagtttcttcgcactttaagcagtaaaaaagctgcaggcgtgggtattaaagagaaccgctatcttacagagataccggaaagcgccagaaaactggcagatgaactgcacctgcctctgatctctgttccggaagcttatccatttgtggatattatcaatccggtactgacccagatcataaaccagcagtcattcttactgacccaggcgaatatgatccataaggaatttttaagccttgccatcaacaataacagcgtaccggagatcttaatgacactgcgtcgttttattggtattccctgtgcctttatggatacccattttaaaaatatcttcttttctgatgaagactctcctcttatgcatcagcttcaggatatggatatggaaaatatttccagtgaatttttaaatcagtatgacaactacgcggttgccaacaaaaatgaatcctttggctatcttctttttgaaaaaggtcgcctggataccggaaatgaaagcagcgcacagattgctttagaatatgccagcatcgtcctcatccttcacagccaggtgcgtattgccaatcagcagatggcagaaaaatacaaagcttctttcctggaagatcttctgttaaacaatgtaaaagcagatatcgagatccacaaccgtgcaagactgtatggctgggactttacaaacggcggtctggctgcagtggttgacatcaataacattaaaaagtactttattgaccgtttagactccaacaccaaccggatgctggaggaagcaacagaactgatcttccgcaattccatccacgaaatgcaccagactttcccacaggccaaatatttccgtcaaagtgatctgatcgtattcattatttctgtaccaaaagacagcagggaacttcttgcagaccagctagagcagacctttaaacggctacagagccagttatcccatgtaagcccctttaccattaccttagggatcggacagtattatgaaaatatccgtgaaatatcaaaaagctactctgaagccagagtagccattaatcttggatattctttgcagtggtttgaccgcattttattttataaccgtttaggactttaccgccttcttgccccggtcatgaacagcccggagtcagaggaactttgccttcagtacattaagccattggaagattatgataagaaataccatggggaactgctttccaccttacaagagatcttacagtgcggctggaatctgaaagaatccgctgaaaagctgtatatccactacaattccattaaataccggtattccaagatctgcaaggtattaaaccttgacctgtctgaccatgataaccggtcactggtagaaattgccatgaagctgtaccggctgaaacattataaaaaggagaaccagtaaagcctgggaaatatttttaagttgcttttttaacatctctgttatatcatgccatgtaggtagaatatagcaggctagaataatatgtcctttcggagtctttcctacacctgcctttgtggccgattttccgccagtcgcacccgaatttcatcaccatacgcctcagaaatttgagtacaactgactaaaaatcttctcacaagatcaggtacagaaagattccgagagaacattaatgtatttgggaggtttacatggcaccggaaataaattcactttcttcagaaagcaatgtttttcatcatctatatgaacaggcaagactgctttacaattttgccagtctgatgacaactcacagcaaccacaaaaactgcagcgaactggctccgactttaactatgaccgaggtccatctgttagtagatattatggaacagccagggatcggcgtatcagagcttggacgcttaaacttaaagacccggggcgctatttcccagatggtaaaaaagctggaacaggctggcatgatcacaaaatctgtaaatgaacagcacgcacggatcctggatctgcatctgacccctcttggactggccattgcaagggaacacgccgaatttgatgtaaaggcactgaccaatacattaaaccagctgttagataaatgttccatggaagagatcgatcatttttacaaggtcctgcagtgttataatgatattcttacacaatccaacaacgaataaactggtgtatgtttaatgttaaacatctatacattcaaatctcttgtgagatctgtcaaaacggcagatcttttttgtgtaatatcgccaatcttcgtgtattttcaaaatatactcttgtttttttataccagtagtgctattttaaagtcaatgattagcagctaaacattcaatgaggggacgctctcagaaacgaacacattatcttacacatcccgatgtactttaagtgtacatcccaagaaaagggggacatattcacatggcaaaacagggtagttccacaaagcagttaaagcagactctgggcttctgggatctgatgagtacggcaatcggtcagatcatcggagccggtattatgacacttttaggttccgccatcgctcttacaggccgttccgttccgatctcatttctgatcgcagcagttctggttgtcggttattccattccaaagatcctgatctgcggtgcagtccgtgcccgcggcggtgaatacaccatggtggcaatgttaggcggcacacgtatggcaggtatctacaccgtagttaataccttaagcaacttatcactggcaatgtattcactgtcatttgcaagttattttatttcacttttcggcttcggaaacgaaaaagtgatcgcacttattgttacaactcttttcttccttattaatatcgtaggcgttgatattatggagaaattccagaacctgatcgtagcaatgctttgcatcgccctgggattattcgcagtcgttggtctgaaacatgtacagcctgattatctgacaaacggatttttaaccggcgggatcggcggactcttccaggccggcggacttttaaccttcgcagtcggcggaagtaccgtagtcgcaaacctgtctgcagaagcaaaaaatccaaccagggacatcccggtagttatgcttgtttccactttgatcgtagccgttatttatggcctgatcggtatcgttgcagccggcgtacttcctgtggaacaggttgctggcgaaaatctgtcactggttgcacagtatgttctttcccgtccgctgtatgtattcttcatgacctgcggcgcaatgtttgcactgatctctactttaaacgcacagtttgcatgggctaccaagccgatcttacagggctgtgatgacggatggctgcctcagcagctggcttacctccatccaaagtttaaaacacccgttgtactccttggcatcctgtatgtgatcgcagttgtatgcatcatttccggtttatccgtcagcatccttggaaacctttccctgatcatgaccactctggcagttgctatcatctgcgcatttacatggaaattgcctatcatttgtccaaaaggctgggctaattccaagtttaaagtcagcggccctgtaatgactgccatcgttattttctctacagcttgtgctgtatttaacatctggctgaacgtgacccagctgtccaagggacttattattggaaacgtagtacttctgatcatctccattattttcgcacaggcacgtatgagccatgttgacttaagcccaagttatgaggaaaactgcagggatgaagaaaaggcagaaaactaaattttaattaaaaacagtaagaaatatcaggatctttctcatgaaatacgattttacaacacaggtatccagagaaaacacaggttccagcaagtgggacggcatgtatgcagcaaacccaaatgtaccggagggaaccgtaccattttccgtagcagatatggaatttaaaaacccgccacagatcgcagaaggcattggagaatatctgaaaaactccattatgggatatacctttgcaaccgatgcttattacgatgcagtgatcggctggatgaaacgtcgtcacaactgggatattaagaaagaatggatcgtagagtatccaggcgttgtacctgcactgtaccacatggtaaacctgtttacagctccaggtgatggtgttctcttattcacacctgtttactatccattttacaatgcagtacgtaaaggcggccgtactctggcagaaagccgtctgctgcttaccggcgaccactatgagatcgattttgcagactttgaagaaaaggcaaaagatccaaagaacaaacttctgttattatgcagcccgcacaacccggttggccgtgtatggaccaaagaagaactggctaagatcggtgagatctgcttgaagaacaatgttatggtagttgcagatgagatccacaatgacctgatcatgccaggttatgagcacactgtatatgcaactgtttccgaagaaatggcacagaactgtatcgtatgcacctcaccaagcaagaccttcaatatggctggtatgatgacctccaatatcattgttccaaatccggaattaaagcagaaagtttatgactaccgtgagagccaggctgtattcttctgcaacatggctggttataagggctgtgagatcgcatacaatgactgcgaggactggctggaagaattacttcctatcctggaccacaaccgtcgggtagtagaggacttcatggcagagcatttcccacagatcaaagtaatgcgcctggaaggaacctacttacagtggctggactgcagaggacttggccttacttataaagagctggaggcatttatgacccaggaagcatttatctttacagatgaaggctatgtattcggcgaacctggtgaatgcttcgaacgtatcaaccttgcttgcccgacccatgtactggaaactgcattaaagcgcatggatgaagcgtggaagaaacataataaataaaccagacagactcccttaccaactctatcaaaatatataaatacagaaccggcaggaaagtatttccctctcctgccggttctgcatttataaatatgatgttttcgtgatctttctattttctcatttcttttaaattatgccaaatcgtaaatccaactcccacccagataaagcagaaagcgatgaggcggtggatctccagtggttcatggaagtaaaagcgtcccataaggaactggatggtggggttcacatacattaaaataccggtaaggtaataagggatcatttttacacccttattaaataacagcaatggaacggatgtgatcacacctgccattggaaacagtaaaaactgcattccatgaagaactcccagacttccgtgtccgttcatttcgctgtaaacacagaacagcagcgcgatcggagttacaaataaggtctctgcaaacagggaaagtcctgcatccagatgcacacttttcttcactgccccgtaaaaagcaaaacttaaaccgatgaccattgccattaccggaaccatgcggtaaacgcccatgagataacctacaccgataatggaaaacagtgctgtcatctgctctaaacggctcattttttcatgaaataaaaatacgccgatggctgttacaaaaataggttccagaaaatatcccagactggcatccagtacatgccctgaattgatagcgaaaatatatacaccccagttgacacatactaaaacaccgctgaccatacagcagatcatggtctttttgtctgcaaatacctgtctgatatctccccaccgcccggtcactgccagatagccaagcataaaaagcatggaccagactactctctgggccagtacataggcggaatttacctctgcaagcaggttccagaaaacagtcagcagtccccagcagatgtaggtgatcgtaacgctgatggcaccttttctttttgtattatccatatgcgatctctcctgttgtcttttgtatttatttctgtctgtttttatctagtttattttatatttcaggatttgtaaaatgctttttgatatatgaccacaaaaaaacatcagtactccaggctggtgaattcctgtgtaccgatgttttttatggcaatcatttctgttttttatctttgtttgtcacatgaacatttctgctctttatctgtaattattctttatcaataaccccctgctttaccagttctctcttcagataccgcagctggccaccgcagagaactacttccagctcattatctgtaagatctaatttcaccttaaaggtaaagccctttgttacatcttttacttctacttcccttgcctggatctggtctaagaagttctcgatctccagttcatctctcagatcgatcttctcataatcagccggatcctcaaaaagcattgggacgataccatgatttaccagatttcctttgtggatacgggcaatactcttggcaatgacacattttactcctagatacattgggttgatggctgcatgctctctggaggagccctgaccatagttctcaccgccaatgatgatactggagcccatttctcttgctctctcagagaactcaggatcatatctgtgatagcagtatttggacatcagcgggatgttggaacgcatactggaaaactctgcgctggctggtgtgatgtcatcggtggaaatattgtcgccgccctttaagcttaccggcacttttaagtgctgaaccggtacttccggaactggaaggaacttgatgtttggtccacggacgatctctaccttcttagcttcctcttccggaagaggttttatgatcaggttatcattgatctcatactcatctttttcatgaacagctgccagaatgtcaatctgatctcctaaaatatctgctgctgttgcaaatgttcccatgatcgcagtggctgctgcactttccgggcttaccagatagatctttgcatttggattacctgcacggcccttaaagttacggttggaagtacgcactgcaatgccttctgtagccggtgtctggccgatagcacaacatggtccgcaggcgatctccaggatacgtacacctgcatccataagcattcccagataaccgtcttccatcaatgctttgtaggtctgtctggaagcaatggcacaggtacagcttacattatcatttaccttatgtcccttaaataccagagctgcctttgcaatatctgcataacttgcgttggtacagctgccgataaatacctgctgaacaggaagtttttctacctcggacagaggttttacattgtccggctggtgggggcatgctactaatggctgtaaggagctaagatcaagatcgaccacttcatcatattctgcgtcctcatctggaagaagttctctgtactcatcttctcttccctgggacttcataaactttcttacctgctcatctgccgggaaaatagaggtagtagcgcccagttccgcgcccatgttggtaatagttgctctctgaggaacttccagagttgccgcgccaggacctgcgtattcatatacatttccaagaccgcccttaatagtcacacggcgaagcatctctaaaatgacttcttttgcgttgacacctggctttaaagcgccggtcaggttgactttgatgactcttggcattttcagacgcataggaacgccggtcatggctgttgcaacatccataccacccacaccgatacacagcataccaatggaaccgccgtgaggtgtatggctgtcaccgcccatgcttacctttccaggagcgccgaaacgggatacctggactgcgtggcagataccgtttccaggtctggaaacatggacaccgaagcgctcagctgcagactgtaagtaaatatggtcatccggggtcttatgatctacataaagaaggttatgatccagatagcttacgctgcattcagtgcggatccggtccaggccaatggcttcaaatgccagataagtcataactgcgttaatatcatgtgtcagtgtctgatctacttttataaaaacttcttctccggctttcatgcttccggatacatagtgagattcaatgatctttcttgtaagtgattttcccatagtgttctgtctcctggaatttaagtatctacataatcatttctttaactactgtttccgctgatccggtgccgggttgtctttttctcctccctgcatatgatcataatcctgcagtttaacctgagatacctctgtatccttctttctgccgattcttatttttccagatttccggctcctgaaagttttccggagcttccacaccaggcacccgatcactgctgctgttatccagaacgggctggtaatgatcacacagattccaaagtttttcactccttctgccaaccgccttccattatctgacaatccctttaaaatctgctctccagcagattccggaacagcctcggtataccgcttcacttcgttaatatttaacgtcacctgactgtactcgatctggttgtcatagagacgcagctgggattcgtaagattccagttcataacggatatctgacagccgctcttctaatgcgatgatgctatccatggagtctgccttttcaagcagtacccacaaacggtcctgttcaatctttaatgtctttttgcggctctcgatgtcactgtactgcagtgtcacatccttggtgctttctgaccttctaactacgtttcctgctgactccacaccatttaagaattcatccaaccggtccttgggcacacgtacggtcagatcagcccagcgcatcataggattgccctgccagtctaattgattgccagaaacattttcattttcaatatatccgccgaactgcctgatctgtgttttcaaagctgtcatcaactgctcaaactgctcagtctcaacgtccatgctggcagttctgatcagctttcggcctgtttctactgttgccatattctctgttcctgatgctgtgcccgctgctgtatccacaaaagctgatgccccttccccggacatctcccccttctcattctccacatccatggcagcggctgctgtctccatgatatacccgttattgatgctgtttttagaaccgcttgcggctccacaccctgaaatgactgccactactccggcaattgcaataccacgccaatacttcctcataattttcctccttccatgtctaatgttctcccggaatcttttttcatttcaaaaaataatctgattttttaccacgctgccttccttgtattttcagtatatcagatttcttcccgtcaaacctatcttttcccttaactttgtgcaaagattctcttgcagacagtgcaataacctatcaaacacactgatgattttgctaagtatatcctgccttcttcttacatgccccattaaaaaaacttatatgtcttatttaaaaaaaactattttcacatccagagtattgctgtataatcccatctttgacagtcaaatttatcaaaacaccgctgaaagccttattctacctgggtttttcagcggtgtcttttcgttttactatatagtcttt

SEQ ID NO: 3538 - DNA, 924 bp, Unknown
  gut microbiota DNA sequence
caacctgtgtggtctaataatttatacaacaattatatggcttggaaagaaggtgacagtttttggaaattatttgaagctgctttgcttgacaagttggtcaattcagccaaatcggaaatgattggtaaagttgatatgaaggcactggcagatggtcgggtagccgaagaggatagtggagacagccgttgggtaaggtttgaaaaaggtcatcatgaggtagtgattgatttgcaaaagaatacttcgcttcaaaaggtgctggtacgtactttgaactataatcaggaaaagataggtgctcctttgaaggtttatgtttacacttctcaagatggccagacttataatctggcttcaataaaggatactccgtattttcctaacaacaagcatgatgcttggattgacgcagtcttgatagataatttaaaagaaaagacacgttatgtgaaagttgcttttgacgctttggaaaatgtgtatatggatgagatttttgtaaatccaagtattcgttaaccaggtaatataatgaaggaataatagggtcatccggaaaatatgaaatatagtttgagatgaattgatattatatgggaatgaagccgcccggatatggaagatgcagccatcttaaacagatatgtctaagtagaaaaagtatgatttcaggctaatagaaacgttaattatcgcatttcattaatacaatgaagtgcgatataaaaaacaatacaatgaaaaaaatcttaatttattaatccaaaaatgaatctatgaaaagattacacaaagctatgactcgaattgtcggagtgcttttaatggcacttatgatggttccaagtggtttgaaagctgagacgacagaaatgcttcaaacttctaaaattacgggtgtagtaactgacgatttcg

SEQ ID NO: 3539 - DNA, 201378 bp, Unknown
  gut microbiota DNA sequence
cgtttacacaaaacttgaaacggtctctatggtggctgcctggatatccagcggcacgatcccaacattgctttattatggcatgaagatcattaccccaaaactgtttttgccaatttgttttattgttcctgcatttatggctatatgtacaggaaccagctggggttccatcagtacgatcggcgtagttttatgcggtatggcagcaggactgggaattccggtaggtatggcagctggtgctgttatttctggagcattctttggtgataaaacaagtcctttatcagatacaacactactgactgcgtcagcctgtgaagttccgttatttaagcatattgcttctatgtggtatacgactcttccagggattttgatctgcctggtactttatacagttctggggcttaaggcttccggcaacattgatgtagctgcagtaaatgaactttccaatggattaacagctagttttcacatcagcccattacatattattcctgtggcactggtattgatcttatctgtcagacaggcacctacacttcttgcatttggtacaggcattggcagtggtattgtttggtcaatgatcttccagggacgtggatttatggaaaatcttaactatattatgaatggtttttctattgaaagtggtatggaatctctggatggattgttaaaccgcggtggattttccagtatgctttcattagttggaatcatgctgatacttggaatgttaagcggtctgttttcagaatcacatgtattgacggtattggtaaataagctttctaaaaagctgaatactcctggtacgatcctggcaggcgtatggctgtcaagccttatcatctgtgtgatcggcggccagtatgttgcagttacgatcccggcagtagcatttaaagatgtatgcgatgaaatggatatcaaccgtgcagtattatcacgtacactgggagatgtaggagtaatgatagcagcacttattccatggaatgcgtgggtgatcggttatggtgtagtgcttggcggtattactgtaaatgaatttataccatacacatttcttccaatgttatgcccgatcatttcaatgatccataattttgcaggtgttggcctgttccataaggatgatgaagtaaaatatcgtccgttgtggagaagatagatttataaaaatacggaccaccgtttggcagatatgattgctggacggtggtctttatttatgtttagcagacgtcttgcttttgatctgaaagttataatttttctcaaaaaacgattgacaattaagttagttagtgctaatcttgttttcagttagatatattagtctagactaaccttgcagagtgacactatacataaaataattgtctctcgtggataatatgagaagagaaagtcaaaaatatggataaaaggcatcaaaacaggatatccgtgatgcttaaaagaaggaggagacttatgtcagatcagaaagcgcagatcataggagaacttcagagaaaaggaaaaaggatcacaggacagagaaaaatccttctggatgttatattagaaggaaaatggtccagctgtaaggaaatctactacatggcctccaaaaaggatccaactatcggcttggcgactgtttacagaatggtaggcgtattagaggaaatgggatttttaagcagaggatacagatattcttatccagtggaagataagatcagctaaataaaacgtttataaaaaacaggctgcacgtcatataaaaatgtgcagcctgttttttataaacgttttatttcattgggagatcattgcaatagcatattcctttaagtataataaaaaagacacattacactttaaagttcaagaattaagactatataataaaaggggtttgtaagtacattacatacaaaggagacatacagatgaaaatagttgtacttgatggatatacagaaaatccgggagatctttcctgggatgaaatgaaaaaatacggagaattgacggtttatgacaggacaccggcagaggaagtggtaaatcgtattggcaatgcagaggtcgtttttactaataagactccgatcacgaaagaaaccatggacgcatgcccggattttaagtttatcagtgtccttgcaacaggctacaatgtgatcgatgttaattatgcaaaagaaaaagggatcgttgtcagcaatattcctacttatggaacggactgtgtaggacagtttgccattgctcttcttttagagatctgccatcgcatcggacatcatgataaagctgtaaaagagggcagatgggagaatgctccggactggtgcttctgggactatccgctgatcgaactggcaggaaaaacactggggatcatcggttttggccgtattggacagaaaacaggaacaatagcaaaggcaatgggtatgaatgtactggcttatgattcccatccaaatgataaaggacgtgatattgctgagtatgtggaactggatgagatatttgcaaaatcagatgtgatctcgcttcattgcccattgttcccgtctacagaaggcattatcaataaagataatattgccaggatgaaagatggagttatcatcattaataactcccgtggacagctgattgtggaaaaagatctggcagatgcattaaacagtggaaaagtatacgcagcaggactggatgtggtaagtacagagcctgttaagggtgacaatcctcttctgaaagctaaaaactgcatcattacccctcatatttcctgggcgccaaaggaagcaaggcagaggatcatggacatgtctgtggaaaatcttaaacagtttttagctggaaatccggtgaatgtggtgaaccggtaataaaaaaagaaaaaatgtaaagcagctttatatatgatcagaaaatgctgtaaaaatgacggcccgtttccaaaacaggaaacagcgccgccatttttttatatcttagtatgcccgtttaataatatcattcatatgcttttcagcttcaaagcggatccgctcctcatccagagtaaggacttcacgatttttcattacgatctttccgttgatgatagaatcggtcacatcatgtccgtttgcagcatctacgatggtatttaccagattctggcttggagtgatatgaggctgatcaatatttaacaggatcaggtcagctttcttgccttcttcaacggatccaaggatatcaccgtgtccaagagcatttgcaccgccctgggaggccatttttaaaagtgtaggacaggtcatgactacaggattaaaagatggaagtccccagtaagccatcatggcatagcgaagaaccttcatttcgtcaaaaatatccaggttggaaggtgcagcgccatcgcagcctaagccaaggcttgcaccggcttccagaatctggggagcttttggaaaaccgtggtttgacaggttggctcttgggcaatgaatcattttcacaccacgttctgccatcagtgcaatatcgtggtctgacagcattacattgtgggcagtaagaagattggggccaagaatacccatttcttccagaaattctgcagggcgctttttgtaattctgcaggcagaagctgacttcgtctttatgctcacacagatgggcatgaatgccggtatggaattctttagcagattcacctaccatggcgatcagttccctggaacaggtcattacctgacggatagcaaaccagatatcaacacggccatcgccagccccctgatatttctgatacagtttctttgtattttcgatagcttcattagctgtctctttcattgcaccggtaatggcatttcccatatccatggttgattttgcaatggcagccctcatgccggattcaataactgcatctgcaacccggtccatgtgtacaccgccggaatcagcaaaagcagttgttccgcttttgatcatttccagacatgccagaaggccgctgatataagaatcttctggctggagattgctttcaaaaggaaccaggaaacgggtccataccataggatattcatcggcaacacgtcctcttaaaagctgctggcaggtatgtgtatggccatctaccatgccgggcatgacaagttttcctttgccgtcaattatttcactggcagagctgtcagccatcaattcatctgtaggaccgatctttttgatccagctgtctttaattcctacagaacaggtagatgaaaccgtcatatcagggtttaaaacctgacagttcttaattaaaatatcatatttttccatataaatttacctcgctcatgttaaatggcacctgtaagttttaagataacatctgctactaaggcagagaaaataaatgttccggtgattacaaataaggtgatgatcaccagtttccatcccattttagcaaaatccttcaggtcttttccaagtgagattccggcaaatgcgcctaatgcagtggcaggagccataaatgcgacctgggatgtaacaccgatcacaaagtcctttaccggtgaaatagggcatgcaagaagcagtccggtaagagatacatacatcatagacggaagctttataaactggctcataaatttacttactgtaagtccaaaaagagcaatggcgcataataccaggatcccggcaatggaatcacctaccggcattttgtagcccagtatatttgtgagtaccatgataacagaaaccatgagaagcagtccaagctgctgtaaaaagtattttctgaccattatttagcctccttactgtttttgtgaccgattttaggttccagtattgcatacagttttttagtaagaggaagacctacgaatgttcccatataaattccggtgataccagtaagcatatcgctggcgccgcccatgatcataatattttcagcctgctgtgggtagatctcacctaatgttccggcagcggcagtcatcattgatccgcttcctacaccacaggccatgccaagggcaataggatcaaaaatatgccaggaagctacgatgctggccaggatactgacaaaaacggtaccaataacagaaccaacaatatatacagcaaaggttccgcgggtttccggggcatccggtccaaagatatcagtggttaatccaaggttggcgtctcggttgatggaatagcaggcaccgatagcttcttttttcagaccaagcagcagtgcaagaggaagtgaaataaggatggttccaagattaccaaattcctgcagcagaagcgcaggtcctacagcaaccagttttgcaagatttccacctgctgagattcccatttttgccataaaaggtgcaagggctactaaaacaaggcttcctccaagctttgattcttctgttttgaaaagcttaaaggcgtccggtcctaaaagtcctccaaagatcgtggcaaataccattggaaataaggtaagtgtaccaattccaatattgaacttaagtgtaccgatcaggtcgcataccgtagcaaggatcaaggctacaacataaaccttccagtacttgttaataacagttttcagcttttccatacaagatacccctttcttctgtctgtgcaggaattatttttgtgatttaaacataacacaggaagcgttttctgcgaatacgtcaaaaagcgatggatttccatcgctttttacgaaaaccgtctttaaggtcacaggacaactgattcgacctgcattaaaagatccacaaaacggctggctgtatcagaaagagtatatttttggcgtacgatccatcctatttcaagccgccgcccgtttttaacaggaatagaaacgatatcgctgtagttatcatcaaacggccgatagccgcttccaacagcaaatccctgacagtaacgcataacagaataagaagtagcccggtcagaaacctggatcaccctgtttaactgatgataagggacgatcaggtcagtataagcagaattcgtatctgaagaccggtcataggtgataaaaggatactggatcagatcttctatgtcgatttcacggctgccagcaagagggtggttgcagcatatgtatacatgggcagtctgataggtaatgtgattgaaaatgatgcttctgttccttaactcctgcatcatctggcccttgctgtattctgtaacaaaaatgatgccaagatcatctagaccgcgttctacccggtccataacttcagacgtgcggcattcgtgaaaaccgcagtgataaggtccggcacctgtattcaggctgttgatgatcgatacaaaagaattcataccgcagatatgatgctgggaggaaacagataaacctaaaggacggtctttggaaccattgaatttttcgtccagatagtccagacggtttaatattcctttaaattcgataagaagctcttctccgcttctggtaaggcggacacctttgctgtctcttacaaaagcagtgatcccataggtattttccacttcttttatagcgccggaaatgctggactgggcagtaaaagaccgtttagcggcttcactgatcgaaccagattcagcagcaccaataaaatatcgcatttgctgtaatgtcatagaagctctcctttgtggctgacggcagtttatttatgaagatacaaaggtcaaaaggtcataaatccgatgcaagcttgcttgcaggaggatttttgaccttgggacccgccaaaaacatgagtaagaagccattttttgaagaaaaatgagcggattacgaatgtttttagaattgcgggagtgcaaagcacgtagcaattcggtatcagagggggcaaaatacattttgaccccaacatctttatgaattatacagcaaaaattaaaaaaatgcaccttattgagaaaaattatcagcatgtaaagagcctgtattattgacaactaacttaaattagcgtattctaactaagatgatcagggtagcaatgactaacctgaaataggaacaactaacttgaaaaaaggagtgaagaagatgcctttaacaatggcttcgatcggagaaacaaataccatccgcaaagtaggcggaaatgaagaaacaaagcgttttcttgaaaacctgggatttgttgccggagcagagatcacagttgtatctgccatcggtggaaatgttattgtcaatattaaggattcaagagttgcaataaatcaggatatggcaagacatatcatggtttaaatggacatgttgcctaagggtgatatagccataaataaacatgacaaagagaagaaaggagacatagcaatgactttaggtgatgcagcagttggaagcactgtagtagtgactaagatcacaggtgatggcgcttacaaacgtcgtattatggacatggggatcacaaaaggaagtgagctttatatcagaaaagttgctcctttaggagatcctgttgaaattacagtaagaggttatgagctttctgtaagaaagaacgatgctcagtgtgtagaagtaaagtaatcatacataacacaccgtgagaattaaaaagagtcctttgcaatggactcatggaggtaaaaaaggaaatggcaattaagatcgcgcttgccggaaacccaaactgcggtaaaacaactatgtttaacgcattaacaggtgccaaccagtatgttggtaactggcctggtgttacggtagagaaaaaagagggaaaattaaagagcaagagccagagtgaagaagttatcgtaactgaccttcctggtatctattcactttctccatacaccctggaggaagttgtcagccgtgattatctgttaaaggatgatccagacgttatcgttaacctggttgacgcaacaaacattgagcgtaacttatatctgaccactcagatgatcgaaaccggtattccggttgttatcgcattaaacatggcagacctgcttgctaagagaggtatcaagatcgatatcgagcgtctttccatgctccttgactgtccgatcgttgaaacatctgcattgaagcagaccggtcttgataagctgatcgacgaagcggttaaggttgctaagaagaaagaagttgatcttcctaaggagatcttctccaaggaattagaggcagcagtagctgaggttgaaagcgtactgccggcagacatcactgagaacaagaagagatggtatgcagttaagttccttgaaaacgacagcaaggtagttgagagtactccactttccgcttccggcaagtctgttgttgagaacgcaagaaaagcaattgaagaagctcatgatgacgatatggaaagtatcgtaactgacgagcgttacaagttcatccagaaggtagttggaactgctgttaagaagagcggcgagaagctgaccgtatctgataagatcgaccagatcgttaccaaccgtttcttaggtatcccgatcttcatgctggtaatgtggatcgtatactacatctccgtaactaccatcggtacattcgtaactgactggaccaacgatacatttgtaggtgctattcaggaagttgttggcggtttccttgagaatgccggcgcaagcgatctgatcttaagcctggttgttgatggtatcatcggcggtctgggagcagtacttggtttcgttcctcagatggcgatcctgttcctgttcctgtccatcctggaagactgcggttacatggtacgtatcgcattcgttatggaccgtgtattccgtcacttcggtctgtccggtaagagcttcatcccgttactgatctcctccggttgtggtatcccaggtatcatggcttccaagaccatcgagcaggataacgacagaagacttacaatcatgacagcaacctttatcccatgtggtgccaagcttcctgtaatcgctttaatgggcggcgttatggctggctatgtaactggctgggatgtagccggaatgatggctcctatcatgtactttgtaggtatcgtagctgttcttgtagcagctatcatgttaaagaaaacaaaaccattctccggaaaacctgctccattcgttatggagcttccacagtaccatatcccatctgctaagactgttctgatgcatgtttgggaaagactgaaaggctttatcatcaaagctggtactatcctgttccttgcctgcgtagtaatgtggctgctttctacttttggatttgctgatggttcctttggcattgttgaagattccgcagacagccttatggctatcattggtggtgcgatcgcgcctctctttgctcctcttggctggggcgagtggcagccggttgcagctgcaatctccggtttcagtgcaaaggaaggtatcgtttctaccatgggcgtacttgcaaatgttgctggtgacgttgaagatgcagaaactgttgcagaaggtgttggaatgtggttcccaaccgctttagccggattcagcttcctgctgtttaacctccttgactctccttgtcttgcagctatttctacaatggcccagcagatgcaggatagaaagtggttctggtttgcgatcctgttccagaacgtatttgcttacgctgttactctttgcgtataccagatcggcagcttcttattctatggttccttcggtgcaggcacagttgtggcattcgtagtgctactgttcatgctgtatatgctgttccgtccagatccatataaggatcagaagacctattccaagcgttctgtacagtccgcgtcataatgagcgcagaagaaaaacaagcgtcggtatattaaaccggcataataaaggggccgggtggaaacatccggtcccctttttaaaactgcatgattgtggtaaaatgaatatggcagatatccattgtttcatgtttccattaagaaagaagggaattttatgatagcaaatgtaattatattgctccttgtatttggctactgcggtctggtgatctactggaagcgcacaggcgtattaaaagacagctgcagcagctgtggaagcggaaacggcggctgcggcggtggatgcggtggctgcagcggacattgcagcagctgcggcagtgcccatgcacatcatatggacagccataaggcagctaagaaacattgatccggtgcgctgcctgcgtctgcaggcaggacagcacatgtgacataaactgaatgttagaaaaggagcggaaaatgggaaattcatccggttccatgctctatatggtagttcttctcattatcatctatgtagtgggaatggggatctaccagggagtaaaatttatccagaaaaagcgggaagaagcaaaagataagaaattccgcgaagaagagtaaacagtggcatacctgttacagaaatagagggacttagaaatggttaatgcaattgtgatccttatattgatcctgatcgccatctttgctatcagaggcaccattaagcatatgaaaggcgaaagcccatgctgcggtggcggcggagccagcgagatcaaggaaaaaccgagcaagttagagagacctgtgatcggtgaaaagatcgtccagatctccggaatgacctgcgagcactgtgtaaaccgtgtaatgcgtgctttaaacaagatcgacggtgtatctgcaaatgtcagcttaaaaggcaagagagcggttgtttcctatgaccgtgagatcgatgtaaatgtgctgaaaaaagcagtggaagatgcaggttatacagtagagtctatttcataagtttataatggattataaaaagaccagttgtggacggacatatctgtctggtacagctggtctttttgttgaatgtcctatatgcacaatctcccgccaatggcgggggaaagctgtatttggggcatgtcgataatgaagactttatttcagatcttcagctctcaaaatcctgctgcatcctgtcagcgtacttcctctgtgggagatcagcagcagtgtctttcctgcataggcagtctgcagcgtatggagcagttccttttcatgaagggcatctaaagcactggatggctcgtccatcaggcagatatccgggttacggagcaatattcttgcaattccgatcctctggcgttcaccgccggaaagccttgcgctcatctgccccatatcggtatcatatccatctggcaaggtatggataaattccgcaattccggcccgtttggcagcatctttgatctcttccatagaagcaccgggttttgcgatccctatattttctgcaatggtcatgtcgaacagataagtatcctgttccagaaatgcgattcgcttatgcagttccctgaagctgatctgttccagtggaataccgttgatcaggatctggccctctgttggagcatagaaccgcagaagaagccgcagcagtgtggattttccggcaccggactcaccggcaataccgatctggtcccctttgtgtatgacataattaaaatgttccaggatctttcgttctgtacctggataagcgaaagtcacatctttaaattcaatggtctggatctcgccgcaggtaaccgcatgttccggttcctcagtctccggcaatgtgtcctcgatcttaaaaatacgttctgcagcgccatatgcctctaaaaggcttgttaccacaaaagtaaggctgaaagaagaggatagagaagctgttgcagcaaaggaaatagcaatggttcctaccgggttatcgatgccttttgatgcaagatatccggcgcatacaaggatcagtatccttgcaaggtagatgaaaaagttagggaaagaggcaatggtctggcggtgaagggtaagtcctaaagcagccttatttacctggctgtttgccttcattacatcttccattttccggtttcctgcaccaaagatctggatatcccggatactgtatacactttccaggatcttcgatttcagatcacctaactcttccctgtagcgcataccgatgccccgtccggcgatcagtgccccaagaggcagtacaacgctgatcataatatagattgggatcagcaccagtgcatacagcggatttacaaaccatgccagaaccactgttgttaccggcagtaaaatgactgtaaacataggtccgatagtatgtgcaaagaaatattcaagagtttcaatatctgccacagcgatattcataatatcaccggtttcccgtccgatcatataagcaggagaaatacggtcgatggcgtcaaaaagatggactctcattttcgcaaggatgccgtatgcacctaaatgggagaataaaccttccagatagcggcacactgcgatcaaaacagcacaggtaacagtaagggctgcataagtcatcattccatcacaaaaaccagccgcagccaaaagccataaagcgccaaatcccatcagtcccatatgggagagtgctcccagtacactggcaactgttgaaatggcaatatagttccggatcggtcttccaatggccagaagccggcggttcattttcttcattgaataactgaattttcgtttcattctgccacctccattgcctgctggcgtattaccagttcatgatataagccatcctgggccattaaagtttcatgatcgccctgctgtgccaccctgccatcttttagaacgtaaatgcagtcagcgccacgtactgatgacattctatgggagatgatgataagggtccgggtatgggccaggtggccgatggtctcccagatctccttttcactttcagggtctacgctggaagtagcctcatcaaagatcatgtattcagcctttgataaaagggctcttgcaataccgattttctggcgttggccgccggagagggaagcacctgcatttccaacatcagaattcagtcctttttccagtgactgtacaaattttaaaagtcccgcttcttttacagcctccattaaagtctggtcatctgcatccgggtcagcaaggagcagattttcacggatggtcccggaaaaaaggtttacctgctggggaaccatggcaatgtgctttctcagttcctccggcttcatgctgtgatagtctttgccgtccatgtaaatatgtccggctgccgcgtcacaaaaacgcattaaaagagaagcagtggtggattttccacagccggaaagtccaactaaagcgacaacagaacctttggggattgtaagagaaacatcctgtaaggctctggcccgtccttcataaccataggatacatgttccatacggatcccattaaaatgttccttatcttccggcagtgacgggtcaaaggggcgtgttgtatctgtatcaaggatctcctccactttacctgctgcggaaatagcggttaaagcactgtgggaagcgctcatcagctgctgtgcagaagaaaaatagctgtaagaaagcattaaaacgatcagtgcctgtgaaatggtaatggaaccctttgtaatacgtacacaggagtctacaagggcgatcaccagggcagcatagatcagagcttctgttaccaggaaagaggtaaaattgatcttcataaagcagttgatatttttatttaatatatctgccttttcccccaggatacgggaatgttccctgtctctgtcaaacagctttaaagtagtaagtccccgcaggctgtccatatagtagccggtcatatcatccagtgaacgccagtagatcttgcggatatcttcgatcctgctgcggaatgcattattaataggaagcagaaaaagtgatactactaataataaaacagccacaggcatggaaatgttctttaaatgaaagaacagatagatgggcgcgatcacactgtagatcagacttggaaggtaggtactgaaataggtctgcatctgttccacggcatctacagaggctgtgatagcagagacaggaccgatcttttcgatgcctcctgcgtctaattccagaactttggaaaagatcattttccgcatgccttctcttgcctttgcagcggtcctgtattctaacagtccttttaagagctgggcaagaaaggtaaatacagctgcagccagcgcggcccggatggcgctccaggcagtatttaagatcgcctgaggctgaaaaagagtaccaaggaaaccggcaatgatctcagccagcgccgtggtacctaccaacgtaagaaagcccacccctgctatggctaagatccaaagccatagtccccgggcaagctttaaaagagttttgttcattaaaagcatagttttcccccaattttgtatgttttactgctatcttattaaataaaaagacttttttcaatccctaatcccctattgaaaaaaatcgtatattaatatttcatgaattatagcgaaatatttccctgaggatttgaaaaatggcgcatagtatggtatattgaacaaagaataaccagtggttcggccgtagtctgcattaaaataagaagcaatacggttacagggacctgcaaggaggaaaaaatgaaagggattatacttgccggcggaagcggcaccagactttaccctttaaccaaagtaacatcgaagcagctgcttcctatttatgacaaacctatgatctattacccgttatctgtgttgatgaatgcaggtatcagggatatcttaatcatctccacaccagttgacaccccacgttttgaggctctgttaggtgatggaaagcagttcggtatcaacttaagctatgctgtacagccaagcccggacggactggctcaggcatttatcattggcgaggagtttatcaatggtgactccgttgccatggtattaggtgataatattttccatggacagggcttaaacaagagattaaaagctgctgccaataagggaaaaggcgcaactgtattcggttactatgtagacgatccggagcgtttcggtatcgttgaatttgacgcaaacggcaaagcgatctctattgaagagaagcctgaaaagccgaagtccaattactgcgtaacaggactttatttctacgataaccgcgttgtagagtatgcaaagaacttaaagccatctgcaagaggcgagttagagatcacagatctgaaccgtatctatctggaaaatggcgatctggatgttatcttactgggacagggctttacctggctggatacaggaacccatgagtccttagtagaagcaaccaactttgtaaagacggtagagacccaccagcacagaaagatcgcgtgcctggaagagatcgcatacttaaacggctggatcaccaaagagcaggtattagagacctacgaagttttaaagaagaaccagtacggcaagtacctgaaagacgttttagacggaaagtatgtagacaagctgcataaccgcgaattctaacgaacaagctatagggcgcaaaattcaagaaataagcggatgttgagcttgctcataagtccgcttatggcttgaattttacatcggatggatatccgatgcttcttgttgcggcttgccgcagcaagaagatgtccctcgcatagagctattttaggaggaaaaatttacattatgaagatcatcgtaaccggcggcgccggatttatcggaagcaactttgtacatcatatggtaaacaaatacccagactatgagatcatcaacctggatctgttaacctatgcaggaaacctggaaaacttaaagccagtagagaacaaaccaaactaccgctttgtaaaaggcgatatcgctgacagaaagttcatcttcgatttatttgagaaagaaaaaccagacgtagtagtaaacttcgctgcagaaagccatgtagaccgttccattacagatccggaggcatttgtgcgcaccaatgtaatgggaactactaccttactggatgcatgccgtacctatggcattaagcgttatcatcaggtatctaccgatgaggtttatggagatctgccattagaccgcccagacctgttctttacagagacaacaccactgcacacctccagcccatattcttcatccaaggcaagtgcagacctgtttgtactggcatatcacagaacctatggaatgcctgtaactgtatcccgctgctccaacaactatggcccatatcatttccctgagaagctgatcccgctgatcatcagccgtgcattagcagatgaggagcttcctgtatacggaaccggtgaaaatgtacgtgactggcttcatgtatccgatcactgcgaagcaatcgacctgatcatccacaagggccgtgtaggtgaagtttacaacattggcggacacaacgagagaaccaatctggaagttgtaaagactatcttaaaggcattaaacaagccggaaagcctgatcaagtttgtaacagaccgcccaggccatgaccgccgttatgccatcgacccaaccaagatcgagacagaattaggctggaagccaaaatacaactttgatacaggaattcagcagaccatccagtggtatctggacaaccaggaatggtggaaaaatattttaagcggtgagtacagcaattacttcgataaaatgtacggaaaccgtctgtaagtgaacgataagtaacaagtaactgtggctgacggaaatttccgccagccattgacgtgtatagtaagatgtactctgagagtacataataaaagtgagggatcatttatgagagttctggtaacaggtgtaaaaggacagcttggacatgacgtaatggacgaactggcagctaagggcatcgaaggaattggcgtagatgtagaagaaatggatatcacagacgccgcagcctgcgaaaaagtaattactgaggcaaaaccggatgcagtgatccactgtgcagcatatactgcagtagatgctgctgaagacaatgtggaactgtgccgcaaggtcaatgcagaaggaaccagaaacattgcaaaagtctgcaaagccttagacattaagatgatgtacatcagtacagactatgtatttaacggcgaaggtctgcgcccatgggagccggatgaccacagagagccattaaatgtatatggtctgaccaagtacgaaggcgagatcgcagtagagcagaacctggaaaagtactttattgtccgtattgcatgggtatttggtgtaaatggaaagaactttattaagaccatgctccgtttaggcaaagagagaggcgctgtcagtgtcgtaaatgaccagattggttccccaacctatacctacgatctgtctaagctgttagttgccatgatccagaccgacaaatacggcagatatcatgcaaccaatgaaggactttgcagctggtatgaatttgcctgcgagatcttccgtcaggctggtatggatgaagtaaaggtaacaccggtagactcatctgcattccctgttaaggcaaaacgtccatctaacagccgcttaaataaggataaactgacagaaaacggctttgagagacttcctgcatggcaggacgctttgggacgctatttagaggaactgaagaagaacgatatgttttaatccggttcagaataaaattgacttctgcatcaggcagtgatcggccagatacaggtgcagataggaaggatcataaaaaatgggaaaatattttggaacagacggctttcgcggggaagcaaatgtaaacttaaccgttgaacatgcctttaaagtaggtcgtttcttaggctggtactacggacagaaaaagccagatgaaagatgccgtatcgttatcggaaaagataccagacgcagcagctacatgtttgagtattctttagtagcaggtctgaccgcatccggcgctgatgtatttctgcttcacgtaactaccacaccaagcgtttcttatgtagtacgtacagagggctttaactgcggtatcatgatctctgccagccacaacccatactatgataacggtatcaaggttatcaacgaaaagggcgaaaagctggaagaatctgtgatcgtagagatcgagaaatacttagacggcgaaatgggcgagatcccgttagctaagaaagacaagatcggacgcacggtagactttgcagcaggcagaaaccgttacatcggctatctgatctctattgccacccgttctttcaagaacatgaaagtggctttagactgtgcaaacggaagtgcttctgcgattgctaaaaatgtatttgatgcccttggcgctgagacacatgtgatcagcaatgagccaaatggcttaaacatcaacacagactgcggttccacccacattgaacatttacagaaatttgtagtagaagaaggctgtgatgtaggctttgcttacgacggagatgctgaccgctgcatcgctgtagatgaaaagggaaatgtagtagacggagacggcattatgtatgtctgcggcaagtacatgaaggagcagggaagcctgttccacaacacagttgttactaccattatgtcaaacttcggtctttacaaggcatttgaccgggaaggcatttcctatgaaaagacagctgtaggcgataaatatgtttatgaaaatatggctgctaccggcaactgcttaggcggcgaacagtccggccatatcattttcagtaaacatgcaacgaccggagacggcatccttacttccctgaaagtaatggaagtgatcctggagaagaagcagactcttgcaaaactggcatctgaatatgaagtttatccgcaggttcttaagaacgtaaaggtaaaagacaaaaaagcagcccaggatgatgaaaaagtccaggcagaggttgccaaagtaacagaaagcttaggaagcaatggacgtatccttcttcgtcagtctggtacagaaccggttgtccgtgttatggtagaggcatctgatcttgagacctgtgaaaaatacgttgaccaagtgattaaagtaatggaagagcaggggcattgtttataaggcgaaaaaatgcgcctgcaaacgttgatcaggaatattatccataaccagaacgaatagtaaaatgaaatctcattgcttgtaagaataaagggtatatgttatactgtaatatatattttttatcatttgcagcaatgaggctggtgtatcagaggctccggggacaatgttgctccggagcttttttaaacaaatcccatgctgtatacgattttattaagaaaaggaatgatgaaacgtggggctgaatcagtaaaagtactgctgtttatcgtctgccgttacggcgtgatcgagcgactgcccggaagggcttgagattaaaaaatacaaagcagaaccgtttaaatgccggtcacaacagcaagtagcatgtaacaaaaaagacagagatagacacaaggaggaaatagttattatgttaaattataagagatataaaagagtacctgtagttaatttcccggagcgtacctggccaaataaggaaatcgaaaaggctcctgtatggtgcagcgttgaccttcgtgacggaaaccaggcactggtagaaccaatggtagtagaagaaaaggtagagatgttcaaccttttagtaaagctgggctttaaggagatcgaggttggtttccctgcagcttcccagatcgaatatgattttcttcgtaccctggttgaccgcaagctgatcccggatgatgtagaagtccaggtattagtacagtgccgtgagcatctgatcaagagaacttttgaggcattgaagggcatcaagaaagccattgtacatatttacaattccacatctactcttcagagagatgttgttttccacaaagatatggatgagatcaaggatatcgctattgtaggtaccaagatggtacagagatacgcagcagaatgtgataccaagatccgtctggagtattctccagagagctttaccggcacagagctggattttgctcttgatatctgtactgcagttcaggaaacctggggcgctaccaaggagaacccgatcatcatcaaccttccatctactgttgagatgaacactccaaacgtatacgcagaccagatcgaatggatgaatacacactttaagaacagagaaagcattatcttaagtgtgcatccacacaatgacagaggcgaaggtgttgcttctactgaattagcactgcttgcaggcgctgaccgtgtagagggaaccctgttcggaaatggtgagcgtacaggtaatgtagatattttaaccgttgcttacaatatgttctcccagggtatcaacccagagttaaatattgaaaatgtccgtgagatcgcagaagtttacgagcgctgcaccaagatgcagatcccgccaagacatccatacgctggaaagctggtatttaccgcattctccggttctcatcaggatgcgatcaacaaaggtatgcaggctcttcatgagagaaacagccagtactgggaagttccgtatctgcctatcgatccaagcgatattggaagacagtacgagccaatcgttcgtatcaacagccagtccggaaagggcggcgtagcctttgttatggatactttctatggcttcaagcttccaaagggcatgcacaaggagtttgcagatgtcatccaggctatttccgaaaagcagggtgaagttgctccagagcagatcatggaagagttcaagaaggattatctggaccgcaaagaaccaatgcacttccgcaagtgccgtattaccgatacagagactgcagacggcgagtttgcaacactggttaaacttacctacactgatcatggtattgagaagtacttcgatggcattggaaacggaccgattgatgctgttcagagaggcttagaagaggcactgggcatccagatcaaggtattagactacaccgagcatgcactggcatccggttccggcgcacaggctgcttcctacatccacttagtagaccagagtactggaaaagcaacttacggcgtaggcatcagctccaatattaccagagcatctatccgcggtatcttcagtgctgtgaacagactgttttattaatgaatggtaaatgccggatccccggtatgaaataaaaataaatgtgaaatcaaaaagcgtgttgtcatttatggcaatgcgcttttttgtacgtgccaatatccttttttgttataacgcagagccagagtgaactccttcgttgacttaggttatggtcaatgttacaatgttttatgtttcaggatatcatacattacggaggaaaatcatttatgcatgaattaaaagtggcccgttctcaggcgctgacaaccagggaaatggcgcagatcggtctgtttacagctctgatcgcagcaggggcctatattaagatcaatataccggtgcagccctttcccatgcattttaccatgcagtttttatttgtcctgttagcaggatttttgcttggagcccgcagaggtgcaatctgtgtggggatttatctggcggtaggcctttccggtattccggtgtttgcggcaggtggcggtcctgcttatctgatccgtccaacattcggatttttactgggctttgtatttgctgcctggatcacaggaaagctgtcctcccttcgcccgggagcaggtactgcctgggatctgttcagtgccttctgggggatgatggcttattatgtttcaggaatggtgtatttttatgggatcagtaattatgtgatccatatgccaatctcatggaaactggtggtgatcaactgttttctgatcacagtggtggaagattttcttctctgcgttatggcggcatttctggcaaaaaggatccgggcgctggcaggagatatgttccagaattagaaactggtttcagctcaaatgttacattataaatgcgggggttaaacaacttgaaagaatataagatcattttcagcgatattgacggcactcttttaaacaatgaaaaccaggttccagaggagactatagaggaactgcgccgtctggacagtcagggagttccttttgtactggtatcagcccgtatgccaaaaggaatgcgccccatccgggaagaactggggatccatgctcctatggtgtgctacagcggcggtctggttctggatccggatgatcaggaaatatacagctgcctgctggatctggacctggcatgtgagatcaaaagtctggttgcaaaagagtttccggaggtagtctgtggcatatacggtggggaacactgggtagtggacgatatcagggatccgtgggtgatccaggaacagggaattacccatctgataccggaaaccggagatataagggagatttttggaaaagagggtggcattcataagtttctgtttatgggggatgaagaagcggtgatccgtacagaaaaccgcttaaaagaacggtatccacagctttccattgcaagatccaagccggtttatctggaagtaatgaacggaaacgtgtgtaaatcagcaggagtgaagattgtatgtgaaaaatatgacattcctgtggagcagtccctggcttttggggacgggcagaatgaccttgatatgttaaatgcagcaggtgccggttttgccatggccaatgcgccggaagaagtaaaagcggcggctcctttcgtaactccggttgacaatgaacatcaggggcttttagctgtgttgaggaaatattttgatgaaaaataaaatggagtatgcctatgcgggaggtgcttctgcagatacaggaagtacctttggcttaagtggcgcagcgcttaaatggatcgccatgatctccatgctcattgaccatattggggcagtggtcgtggaatatgggttgtattatcagggcggagcagaatgttttcaaaaacttctggaaaatggaaatggccagtggctgtatgtgcttcaacggggaatgcgtatgctgggacggcctgcattcctgatttatgcttttcttctggtagagggcttttaccatacacacagccggaggcgttacgccctgcagatgtttctgtttgccctcatatcagaactgccttttgacctggcggcagccaaccgctggttttatccggggtaccagaatgtattttttgaatttctcataggactggctgttttatggggcatggaacaggcacagtttcgggaaaaaactccccttgcagtggaagcgggaaagatatttgcagtagctttgggctgtatggcagcagtgctgattcagtcagattatgattatatcgggatcatcattattgcagctttttatgagtttcattacagcagggcagggcgcagtgtggcagcggcagtccttggcggcctggaaacactggatctgaactatggagttggtgccctggcagcaatacccatctggttttataatggaaaacggggaaaacagaagtttaaatatgtgttttactggttttatccggtgcatctgaccgttctggtgttgatcagagccggatttctggggatttttccgtggtaatataaaaagtctgcacataaggggaaaatctgttgattgcctgatgatgccagatgcggtatactcggattatgtcgtggtataaaaaaggagcataaaaatgaaaaaatatgactatatattagtaggaagcggactgtactccggtgtctttgcctggtttgcgaagcagaagggaaagaagtgcctggtcctggaaaagagggatcatattggcggaaatgtgtactgtgaaaatacagaaggtatccatgtacacaaatacggtgcccacattttccatacaagcaacaaagaagtatggcagtttgtaaattcactggcagaatttaatcgttataccaacagtccggttgccaattacaaaggtgaaatgtacaacatgccttttaacatgaacaccttcagcaagatgtggaatatttccactccggcagaggcgaaaaagatcattgaagagcagaaaaaagagatcaccggcgagccgaagaacttagaagagcaggccatcagcctggtaggccgcgagatctatgaaaaactggtaaaaggctacacagaaaaacagtggggaagagactgcacagcacttccggcttttatcatcaagagacttcctgtgcgctatacctatgataataactatttcaatgatctgtaccagggaattcctattggcggttacaatgtgatcattgaccgtctctttgaaggctgcgatattgaaaccggcgtagattatctggaaaagaaggaatattacgatggtttaggggaaaagatcgtgtatacaggaaccattgatgcttattataagtatcagtttggcaagctggaataccgcagcctgcgttttgagtctgaggttctggatgaggaaaaccaccagggcgttgctgtagtaaactacacggaccgcgagactccgtacacccgcatcattgagcacaagcactttgaattcggtacccagccaaagacggttattaccagagaatatcctgttacctggcaggaaggtatggaaccttattatccggtcaatgatgagaaaaaccaggcactgtatcagaagtatgcaaaactggctgaaaaagaagaacatgttatttttggcggacgtttaggagaatataagtattacgacatggacaaggtgatcgcttctgccatggcatgtgcaaaggaagaactgaatatgctgtaaacgggggaatgtcatgcctgacggacagaaatatgagcctgagtaagataaagctgctgcaaagtggaaagagaccattttgcagtagcttttttgtgtaccgggaaattccgttggaactaccggcgccattattttccagaaatttccaaaaaccctgttgatacaggggatttacagacgaaaaatgcagcaaaatgacgagctataaaatgacagattaaagattttttgtataatttgtgactttaaagcataaaaatataaatggattacaaaaataaatggtaaaaaattacaaattcacaacaaaaaaacttgcttttttaacaggggtgtgttacactagcacacaagtgtagaccgtagacgtacaaaataaaacttgtatgccgccggccatgaggacagcatgatccatgttgaaaacatgcaggggggtagatggtctggacatctataaattaaggaggacgaattatgaaaagcaaaaaaatgatggctcttgttacagcagcagcgatggcatttggtctggcaggatgtggcggtggaaataccgcagctacaacagcagcacctgctgagaaggcagaagaaaaaactaccgcagcagaagctgttacagaagcaacagaggctgcaaagtcagaaggcagtgataactggaaagtagcaattttaaccggtactgtttcacagggcgaggaagagttccgtgcagcagaaaaagcattagctacatatggtccggagcacatcgttacagcaacttatccggacaactttatgtcagagatggagactaccgtatcccagatcgtatctttcgcatctgatcctgatgtaaaagcgatcgttatgtgtcaggcagttcctggtgcaaaggctggttttgataaggttcgcgagatgggaagagatgacatcctcctgatcgctggtactcctcaggaagacccggctgttatcgcagcagcatctgatcttgttttatatgcagatgaagcagcacagggcgataccattatggaaaaatgcgctgactggggtattgatgtattcgtacattactccttcccacgccatatggcaatggagctgatcgtagcacgccacgaacttcttaagaagaacgcagatgcgcttggcatcgaaatggtagacgttactgctccagacccaactgcagaggctggactttccgcttcccagcagttcatcctggaagatgttccacagcagctgaagaaatatgaaggcaagaaagttgctttcttcacaacaaactgtggtatgcagccttctttacagaccgcttgcttagatgagcctaatgcttattatccacagccttgctgcccaagtccatatcacgcatttccagctacgttaggactggaacttgcaattggcggtgatgacgaagacgcattaaagcagatcgcagctaaattaaaggagcatgacgcagtaggacgtttctctacatgggcatccccggttgctatgaccattattgcagttggtgttgattatgcaaagggatatatcacaggcgagatcacagaccgcaatgatgctgataagctggttgaaatgtttaactctaaagttgaaggggcaaagatcaataattataccaatgcagaaggtgaaacttttgataattactataccattctgcttgctccggttgattttaacgactacttataagaaacttgaaatctgagaaaaggctcaccctattgatttcgggtgggcctttttcagcaaaatgataactgacagaaaggggaatttcaatgaacacagaaaaagaatatgttcttgagatgaaagacattaccaagcattatggtgaaaataccgtattaaatggcgtgtctctttccgtgaaaaaaggcgagatccatgcactgttaggagaaaatggagctggtaaatctactctgatgaatatcctgtttggtatgccggtcatccacagcacaggcggttttgagggaaaggtccttttagatggggaagaaacacatatccattctccttatgacgccatggaaaagggcattggtatggtccaccaggaatttatgcttcttccgggatttactattacggaaaacatcaaattaaatcgtgagatcacaaatcccaatccggtaagccgccttctgggaaagaacctggaaagcctggatatgaaggctatggcttttgatgcccgtaaggctctggatgacgtaggaatgaatttagatgaaaaaacgctggtccatggaatgccggttggatatatgcagtttatcgagatcgcaagagagatcgataaaacaggtgtaaaacttctggtgtttgatgaacccactgctgttcttacggagagtgaggcagcccagcttatttccgttatgaagaagatctctgaaagcggtattgccattatctttattacccatcgtctggacgaggtaatggccgcatctaataacattaccatcctgcgagacggaaagctggcagcaacaagagaaactgcaaaaaccagtatccgtgagatcgcggaactgatggtaggccgaaaaggggaagcaatggtagaggcagccccaagaccggttccaagtgaaaaagtggctatgagcatccatgatcttcatgtagatatgcccggtgagcaggtaaatagcttatctgtggatatttacgagggcgagatcttcggtatcggcggtctggcaggtcagggaaaactgggtatccccaatggtatcatgggactttatgatgcagagggaaaggtagaactgttcggacaggaattaaactttaaagataccagatctgttttaagcgcaggtgttgccatggtttctgaagaccgtaaaggtgtgggccttttattagatcgttccattgaagacaatatcgtatttaacgccatgcagatcaaaggggaatatttgaagaaattcggaccatttacccagatcgacagcaaaaagatccgtgaaaccgcagaagaatacataaagagcctggacatccgctgctttggaccgacccagcattccggtactttatccggtggtaaccagcagaaggtatgtattgccaaggcgctgtgcatgtctccgaaattcctgtttgtttccgaacctacccgaggtatcgacatcggcgcgaaaaagttggtgttagagactctggtgcgtttaaacagggaactgggaatgaccgttgtcattgtttcctcagaacttcaggagcttaagagtgtttctgatcgtattgccattgtttcagaaggcaaactggtagacatcttatctccacaggcaccagacgcagattatggtctggccatgtccggcattaaaccgtccgaacatatagagaaagggggaacagaagaatgacgaaaaataagatccagagactccttgccattctttgtgcagtagcggcagccttctgtatggtattaggatttataaatatgcctaagcagaatggggcggcaggtcaggagatccttcgtaccatgcgtatccagacactgctcagtgctaccggcgacagcgtagtggaaagttacgtagccattgcgaaacaggaagcacaggcggcagccaaggcatccggcggcggtatggcagctatccgtgaagcagtagaaaaggcagaaacagaaacaagagcaaaatacgaaaatggcgcccagagtgatctttccggtattgatgtaaccggtctttctgcagctgttgacgtatatacagaggctgtaaaggcctatgcagaggtggaggctcaggcccgcgctgcttatgaagaggcacattatgcagaggcagaggcagctttagaaaagaaacatgaagaaatgtcagcagcaggagaagagatcccggaagatgatgaagtagtagttgatatgtccggttttgaggcaactcctgaaatgcttgaaaagcaggaagaagcaaaggcaacttatgcaaatgtaggcgcagagctgaaaaagatctatccggtattgacggatgaagcattagaaacactggaagcgacagtagaaggcatcctttatcagtccggtgacagttttgccactcagtatgaccgttacgttgaacagagtaatattaaagagacaaatgaaggacggatcatccgtcacgcagatgacctggtttatttaggctttgcccttttagtattgactgtacttttactgtttaacagctggctggttgcaaaacttggtattccaagagtgatcatcggtgtattctttatcttactttgctttatgaccttatggtatgatctttctctttctactctgttaagtaatacagttgtacgaatgggaatgaatgccatcatggttctggcaatggttcctggtatccagtgcggtatcagcctgaatctgggtcttcccattggtctggttgcaggtctgatcggtggtcttttaaccattgagtttggtattccaggatggggaggtttcctcttcgctattgttgcaggttccgctctggcagctgtctgcggttatctgtatgcacttatgttaaaccgcttaaaaggttctgaaatgtctgttaccacctacgttggtttttccatcgtatctttaatgtgtattgcatggctggtactgccgtttaagtccctgaagcttcgctggccattaggaaccggtcttagaaataccattggtctggacggaaccaacttccgccatatcttaaatgatttcctggcattccagatcggcgattttaccattccgacaggactgctgttatttatggcacttagctgctttattgtatggatgttttcacgcagccgtaccggtcaggcgatgcaggcagtaggaaacaatcctcgttttgcagagtctgtaggtatcaatgttgacaagatgcgtattacaggtactgtattttcaaccgtacttggcgcggtgggaattctggtatattcccagagctacggctttatgcagctgtatacagcacctcgccagatgggctttatcgcagcatctgctatccttatcggcggtgcttctacaagccggtgcaagatcagccatgttctcatcggtaccttcctgttccagggtgttttaacactgggaatgccggttgcaaacgtattagtacctggttccactatttccgaaacactgcgtatcctgatctccaatggaatcattctgtacgcacttacaaagtcaggaggtgagtctcgtgcgtagtaaatgggatattcgtgaaatcctgcagaaaaatgcagttaccgtcatgttcgtggtattatgtatcatcggactcatctgctccggacagacagtttcttatgtaatgtatgaattattcggccgtttaagccgaaacgcatttattgtactggcccttattattccgatcgttgccggtatgggtatcaactttgccatcaccattggtgccatggcagcacagatcgccgctttatgggtgatcgaatggggcatcagcggactaaccggattcctggttgccatgcttatgaccatgcctattgcagcattttttggttatcttatcggtaaactgatgaataagatgaaaggccaggaaatgatcggaggcctgatcttaggttactttgcaaacggattatatcagttattgttcctgtttatcttcggcaacctgatcccgttaaaggctccgggtctggtgatcaagggttctaccggtgttgcaaataccatcgacctttctacagaccgtggttttaaatatgctttagatggtctgctgcgagtttccttcagcacagctgttcttattatctgcggtattattgcagtgggcgccctggtcctgtttgcaaggaagaaaatggagaagaaaaaagcatttacttatggaggcatctgcgtggctgctatcgtagtagcacagcttccatttgtaaagaatatattctccatggtcactgtaccgatgattaccttctttgttgtaggactgttatgtatctttaacaatgccctgatgaaaacaaagatcggccagcagttccgtgctgttggacagaaccgcaccgttgcaaatgcttccggtatcaatgtggaccgcgttcgcgtgatcgctatcgtgatctctaccgtactggctggctggggacagctgatcttcgttcagaacatgggttccttccagacttacggtgcccatgagcaggtgggtctgtacgcaggtgcagccattctggtaggtggtgcatccattaaaaaggcaaccaacggacaggcgcttcttggctgtatcctgttccacttacttttcatcgtagctccatccgcaggaaagaacctgtttggtgacgctgcgatcggtgagtacttccgtgtattcatttcctacggagttatcgctctggcactggttatgtatgcatggggagactataagaagaaaaagaattaataggttgtaaatacaacgaaaagaccgtctggactggataatgaacaggtccgggcggtcttttttgttgccaagcatatcgaggaggcgccagtggcgcgtccgctgattgttagctgattaaaagtggttttatattgttattggtcaggtcagtgaggtaaaatttcttcaagtgcttttaccagcacatcatcttcctcttcattccggatggcgatccgtaaaaactggcggtcatctctggagatcttggaggacaggtctttgataaacaggttatagcgggttaaaagaagttctgttatctctgtggctttgacattttcgcctgtgagttccaccatcaggtaatttgcttgggatgggaagatgcggacaccggggagactgccaagtttttccgcaaaacgggcccgctctgtgcgaagtttgtctaaagcagaggcatagtcttttctgtatttctcttcgatctgcatataaaactcaccaaaggaattgatattccagatggcaacatcttttttcagttgtccgatcaggtctgtatcgccgctggcagcgacacctaagcgcagtcccgggataccataggacttggaaatgctctttaccacgatcatatgtggattttcatctaacagttcttccactaaaagggtaggttctgtttcttctgcgaagtctacgaaagactcatctgcaaggaagcggatgcctttttcctttgtccagcgggctagttttaacataccttcacgggagatataattgcctgttggattgtccggattaactaataccaggcagtcaaggttcttatcttcaaagaaattcatcacatcattttcattgtaggagaaatcttctgtctgaggaacgaatgcaatgaccttttctttgtcacagcggtttgcatattcttcaaaggcaggacggatcacgcccagattgccttttacacgctccataagggctttgatcagttctgcagcgccatttcctactacgatctgatcctggcggagggagaagtttctggcggccaggagagagtttacagccattccggatggatactgtcttgcaaggacatcaaaattatgtttgatctcatccatcattttctgcggcggataataactgtttaccagatagcagaaatccagcatttttggatagcgccagtagccgccgaaacgcttctggatcaggtgagtgcgctctttttccggtgcgaaaatggactcagcaatgttcagatcctggatatcgtcaatttcataccagcgctggttctcatccagacgttttgccttgatgcctggatcatctaaagttaccagaaccttcaatacctgttcatagtattcattatttccaagtgcttttgtataagcttccagaaaaggaacatagtgtgtcctggaaaattcctggctgaatttataaaggtttacggtcttgtaataatgttcggtatcggaaaaacggaactttttgcctgggatcatggcttcgatatcgtcctggtcagagaggaccagacaggttccgtccatccatgactcatatttggcagccagtgccagactgtctcttgggtcatcagtaaggctgtttaatacagagtcctcaaagatgatatcagactctaaaagaagagtgtcttcttttaataaatagtcttttgccaggaaaagggagtaaatattgttggtgcggtcatagaccgggttgtcaataaagacaaccggtgttttgatatgcagaccttcaatatgttctcgaagtttttggccttcatatccggtaacaataacgatccgggacaggttatgctgttctaactggtttaaggtgcggttgatcaggggaacaccgtttacctttaccatacattttgtattattctgtgtcagctgctttaaacgttttcccattccggcagccaggatgattgcttgcatgcgtttttctcctttatgatttgtatccgcttccaggcaggtaatccggggatattccgtctggttttttatggcggtttttaaggacatctttgtagactttgatgcggtaacggcgcatttctttctggtttccaagcagaagcccgaaggtatccaagaaaatgtgggctttatggttcagccagatatatgccatatacaggtgtggatttttggaataggtctttcctatgtcaatggcattgcggaaaccatagtaatttttccagctgatgaccggggcggaaccaacgggggttgttttgtggtttaaaacagctgtagtcacatttaagatccgtgactggtcatggaaccgcagacagtattctgtatcatcgaaccagatgaaatattctgtttttggaaggccgatctttcgtaccatgtcagcgtttaccaacaggccgcagaaggtgctgatatcgtattcaaaagaagctttggcatattcctcttccggtaccggcttataaaacatcagtcttggacactggatgaaacgtctgtgggtggtatcaatggctccggaagtagttacagtgccggaataagccaggtagtttgtttttaaaatggctttctgaagctgttctatataatctgctgcgatcatggcatcatcatcaatgatcaggatccagtcacagtctgtttttccaagatcttccagtccctttgcaaagccgccggccccgccgatattttccggaagatggaggatgtgaaactccggttttccggcgtttgggaaaacggtttcagttccagccgccagctggtccagatattctgaagtaccatctgtactgtggttgtctacaatacaaatataagaaaagggaactgtctgggacagaacctgctgtatgcattcttttaataattccagtcggttgtaagtaacgattgtaactgcgaatttcacgataggctcctttcgcgccgtgttcaatgtgtgtgtttgcacgctcactacagtatagcataagcaatttatatggaaaagtcaaaaaaacttattgaaagatttttgggggtacaaccgtaccattatttaatggagggggataatttttcttgggaattccattgcatgtacaggaaaattatgataatctaccagtataggattcctctgtaatatggaggaataaaatgagtaaaaaaacactggaagaactggtatttcatgacgattttatgtttgcagctgttatgatggatgcagaaaactgccgatgtttcctggaacgtgtgttggagatccagattgaaagagttgagatcagcacagaacatggtttctttttcaatccggaatgtaagagtattcgcatggacgtatttgcaaaagatgaaaacaggacgcattatgatattgagatgcagctggtgaaaaaagacagtctggaaaaacgcagccgttattaccacagtcagatggatgtggaaatgctggaaaaagggaaaagttatggagagctggcagacacatatgtcattttcatttgtaactttgatcccctggggcagaaaaaatgccgttataccatccgcagatactgtgaagaaacgggaaatgtatttggtgacggagtctgcactgtttttcttaatacaaatggaaaaaatcgtgaggaaataccaaaggaactggtagcattacttgattttgttaaggctgatctggctggaagtgaagctgattatgaagatgcattggtcaaacggcttcaggagtccatgcgccagatcaaaagaagccggaagatgggggaacgctatatgatgtttgaacagtatatgaaagagtatgttcaggaacatgcagatgagatccgggaagaagcgtgggcagaaggattggcagaaggccatgcagaaggcttacagaaaggtcgtgcagaaggcttacaggaaggtcgtgcagaaggcttacaggaaggtcgtgcagaaggcttacagaaaggccgtgcagaagctactaccagactgaataaattatattcctgccttctgacatcggatcgtgcagatgatctgcagcgtgcactgaaggatcctgtatatctggaacagttattgcaggagtttggtttttaatggccaaaataaagatcaatgattataaattctatgaataaaaaagtccggctcatatcatgtgagccgttttgcctgaatggcagaatctatttctattaagtatcttatatcgtagtcaattcgactgaatttcaaaagaggtacagaggaatcctatatgcttttatgtaaaaagtgaaaactgccgtaggaacatctgtttgagatgaacctgcgacagtttgtgctttgcctgttaatattcttctaagtcgtaatcataatcgtagtcatattctgtgtcatcatctgatgtttcgtctcctggttcatctacggcatcgtaatctgtctcgtccagtacgccgtcagagtcaaagtagtaatatttcccatctatggtcagtccgccagttaccatggcaccgcttgcgttaaaatagtaccagtgtccatttaactgctgccaaccggtaagcatatagccgtcactgttaaatagataggtggcgccgtcgatgtcagctataccgtcagcatagtaggtatctgcagaaaggcggtaccaccagccatgatcatctttctgccaaccagtagaaacctgagcggctgctgtttctgtttgattttgatttccggaagaagacggatttttggaggaagaaccaccagctgagccggaattaccagaagaaccgcctgcataagggcagaccccgtttggatggagatgagcaggattgcctccgcagtgatagtgatagcttccaagaccgcttttgtttttataatcatgatgtccgccgtttgcatcagtccggccttgatgtgcctcagcctctataatcagatttccggatattccggtaaatgcaggcgtaagtcccaaagaaagactgaaagcagtgataagaacagccaatggctttttcatagttgtactcccccttatgatcatttgtggatctgtatttattatggttacattataagtatagaataggcacaaaaacggtgatttgtcaatggctgaggtcatctccgtatgatctgtgcatattcggcccgcagtttctccagataatggctggaggtgagactgtttttgcttgcctgcatcagatttaaaatgatcagatcaaggaccagtaaaggaaccgtcatagaatgatattcatttggttcgccgcgatagcagtaaaaagtcagtctggacggcatttcttcctgagtcgcaaaaaggtctgtaaaaaggataaccgggcagtttatcttgttacagtgatctaaaaggatccgtgtttcacctaaaagacgtgagaaactgaaaagaaggaccagatcattgccggtaatgttgaccatatattcataaatggcagatccaccttctaagagaacaggctggatccccaatcgtcttgcgcgataacaaaaaatggatgccagtccgcaggaagcatccggggcatagatataaacatgctgtgcctgcagtaaaaggtctgctgcacgggctggaagtgctggatccatacggtccagcgtttttgctgtattatttccaaaatgcattttcaggtcttctgtaagggaagcggtttcttcaaaacgcttcagtgcagaagtaaggcgggaactgggagtggcagtatcctggatccgctgctttattttcagttcttttaaattctgaaatcctatttttttccaaaatcttgaaaccgtggcaggactgatgcctgtgtgtgcagaaagttcttctgaagtgagatactgaagctgttcttcgtttcgcagaagatactgtatcagtttatggtccgattttgaaaatgtatctttatattgttcatataattcctgaagcatctgagaatacaactccttttttgatctgaatggctgaaaatgattatctatgtgagttattttatcatttggtgatcataaatgcaaataaaatttcataattataataaatgaaaaatattactcatattttacatttccctgcttttgaattttacattccagaccgtataatgcaaacagttcaacaggaaaggggcatggatatgaaacagatatttgtttcatcgactctgctttggaatgccgggctggaagaaatgtttcagcgggtatatgacaatggatttgatggaatcgaactttgggcgcagcagttttttgcaagagggtatgacacacaggagtatctgcgtcttcaggcattataccctttaagaacctgtgtacacagctgcagctgggatttaaatctggcttccatgaatcaggggatccgggaaatgtccataaaacaggtggaagcatctatgaggctggcagcagagttagaagcaatggaactgacagttcatccgggacatatgacacttccgggacgaagagaagagagcatgaaacttcttcaggactcgttagaacagatcggaaggctttctgaccggatcggagtagatgtttctttagagatcatggaaaagatcccaaaagaatttgtaacagatgcacagagtatggaagaagcagcaggaagcagaaaaaaacagtttttttatactctggatatagcacattgtgacagcgaagaagaaccatttcacatattagaccagatgaaacggatctccaagatacatatcagcaaccggaaaggaaaatgttaccatactcctttagaaaacggtgatttttcatttaaagaaatgcttccacaacttttagcatatggactccctctggtaacagaaggctatgatgacagcagggattttcatacatttacagaaaatacagcttttttaaaaacaaacggaggactttaaaaatgaataagaaaatggcattaatcttaacaacagcagcagttatgggacttgcaggatgcagcggacagactgataaaacagaaacaacagcagcacctgccaagaccacagcagaaccggctacacaggcaaaggcagagacgacagaagcttccacagaggcagaaaagaaagatgtttccggaaagatcacattatatacttcccagccggaggaagatgcacagaagctgatcgatggctttaacaaagagtgcccggatgtaacagtagatgtattccgttccggaacagaagaagtagtcagcaaggttttggcagagcagacagcaggtgctgttcaggcagatgtgcttttagtagcagacagtgttacatttgaaactttaaaagaacaggatatgcttttaccttatgagtcaccggaactgaaaggcattccggaagaatacattgataaagaccatatgtatacaggaacaaaggtgatcacaacaggtattgcatacaacacagatctggtaaaagatgcgccaaagggatttgcagatctgacaggagaggcatttaaagatgcagtgatcatgccaagcccgttgtattccggtgcggcagcttacaatctgggggtactcagccgcaatgaaacattaggctgggatttcttccagggattaaaggataacggaattacagtagataaaggaaacggagcaatacagaaggcagtagtggcaggagaaaagtcctgcggtatcctggtcgattacatggcaaaacgttctaaaaatgatggtgccccggtagagtttgtttatccggaagaaggttcaccagccattaccgaaccaattggtgtgttaaaagactccaggaaccaggatgcagcagaagcatttgtagatttcgttctttctgatgaaggtcaggaactggcagcttctattggttatacacctgtaaaagagggtgtagcagcaccagaaggattaaaatccattgatcagatcaagaccatcagtgctgatacaaaagaactttacagcagccgtgacgcagataaagagaaattttctgagattttccagtaacagcaggtatacaggcagaaaggggcagcattgttatgaaacataaaaaagtcttaggcagtacaggtctgctgctgttttacctgggagtcttcctggtatttatagcgccgatcgtccgtttgctgtttatgagcctgaaaggaagcgatggttatggactttctaattatcaggtcctgttacaggaaaaacggaccagagaagcgatctttaatacgatcctgatcgctgcttcctctaccatgatcgccatcgtggcaggaagcggactggctctggcagcagcttataccaatataaaaagaaaaaggcttttagaattactggtgctgcttcctttcattatcccctcttatattattactctttcctggagcggatttttaagtaaaaaagggatcgtaaaccagatccttggggcagtggggatcggtccggtgaatatttattccattggcggtattttactggtgatcggtatctgcaacatccctgttgtatacatgagcgtgatccatatgcttcggcgtattccaagagacctggaatgggcttccagagcctgcggatttggtctttcttatacactggtccatgtggatctggtgcaggtgcttcctgcgatcattgcaggcgggcttctggcgtttttatcagccattgataacttctctgtgccggcatttttaggtatctcttctggcatcccggtgctcagcacctatatttatgaaaaagcaattggatttggaccagacgctttccctatggcagcagctctttctgttcttttatctgtgatcgcagtaggcggtacattgatggaaacagcattagtgggaaaaaatggaaaatcagaaagcattaaagaagattattcggtacgtattgagctggaaggaccaaaacggaggctattagaatgggggctgttgggaacattaggtgtattaaatctggttcccattctggtaatgataaaaagcgcatttttaaaaacatatggcctgaaaatgacgttggataatctgtcccttaaaaattttgcttttgtatttacaaacagaggtgttcttgccgctgtcagaaacagtatccttctggcacttgtgacttgtggagtctgtattgttgtgggaactgcagcagcctatatgaaagtgagaagaaacagtaaaggggctgtgaccatggaaaaatgtgcttctctgacctatgccattccaggtatcgttctttctctggcaatgatcttccactgggtagagccgcttcccgggatccgtccgggagtatacggaaccatatggatcctggtgatcgcttatataaccagatatctgatccttcagatcaaagagagcaccacagctcttatgtctgtgaacccggaactggaagaagcagtacgtgcctgtggcagaggcaaaagagctctctggcagcaggtattgcttcctatgctggtacgtcctattttatccggttcctttttgatctttgtatcatcacttacagaacttactttgtcatctatgcttgcaagtgcaggaacaaagaccataggacttactatttttaacttccagcagtctggagattacaatctgtcggcagctatgtcagctgtgatcgttgtaatggttcttacaggttactgtctggtggctttaaaaccggcagaaaaaaagaagagaggaaaagaacatgagtctttatttagagcatataacccagaggttcgggcaaacactggcgcttaatgacattgatctggaaatacgaaatggggagtttctggctattttaggaccttccggctgtggaaagaccactcttttgcgggcgatcggcggatttgcaaaacctacagagggaaagatacggatggatgatgtgatctattccggaaatggaaaaatggttccggtagagcagcgtgacctgggaatggtatttcagtcatttgctttgtggcccaatatgacagtgcgccagcatgtagaatttccaatgaagagtccaaagcagaaacacctgacagaggcacagaaaaaagaagccgtagatgcagccattgaaaatatgggattaaagccttatgaagaccggtatccgggagaactttccggtggacaaaggcagagagtctctcttgcaagagccattgtgggaaagccatccattcttttaatggatgaacctttaagtgctttggatgcagaattaaagatcagtatgcgccgggtgatccaggatgttcaccgtatgaccggggcgaccattatttatgtgacccatgaccagagcgaggctcttgccatggcagatcgtatcctcattatgaaaaatggaaagatagaacaggtaggaacacctgaggagatctatctacatccacagactgaatttgcagcgtcctttgtaagcaaatgtaattttgtcagaggacaatggaatgattcctattttaaagtaatggatcagtcccttatatatgatggaccggaagtagcacaggcttttaaaaaccatggtctgtttcctgtacgtccggagcagtttcacattgtaaaagaaggaaaaggtattccggcaactgtaaccaacaggcagtacagcggcagggagatccattattccttaaaatgcggggaagatacatttacggtatacgcaggaagcagagaacagtatgagccgggagaacaggtaaagctggtttaccaggcatcataagaaaagaggaataaaaaatgaagctgttatttgaccttcacacacatacagtggccagtggtcatgcatttagcacattaaaagaaaatatagaagaggcagcggccaaaggattaaaagccatgggaacatcagatcactacagtgccatgccgggatctgcgcagcctatttattttactaattttaaggcgatcaaagagaaaatactgggagtccgtatttttaccggtatggaagccaatatcatagatctggaaggaaaactggatgcggaagaagctgttttaaagaaaatggactatgtgatcgccagtcttcatgttccctgtgtaaaagcaggaaccagagaggaaaataccaatgcattgatcggagctatgaaaaatccatatgtgaagatcatcggacatccagatgatgaccgttttcctctggattatgaaaaactggtaaaagcggcagcaaaagaaaaagtggcgctggaagtaaacaacagctctttttctccccgtaccggcagactgaatgcagacaaaaatcttccggttatgctgtctttctgtaaaaaatacaaggtgccggtgatcgtggacagtgatgctcacatattttacgatataggaaacctggatcgggcaaaggaaatgttagaggcttgcgaatttccgaaaaaactgatcctgaatacgaaattaaaaggtctttcttatgtgctcaatctggaacgggaagaaacaagagagaaatacgatcatatgatggaagattagaacattgcagacagatttatctggaaaatccgcaataatgccggtactggcattgttgcggattttttgccttgcttaaaaaggtttccatgggtataatgagccaagagacaaaaaagattttaagagaacataaatataaatggagtatagagaagatcttatggcaaaagcacccagtgttcggaaaaactatatatacaatttaatttaccaggtgatgacgctgatcaccccatttatcacgaccccgtatatttcccgcgttctgggggcagatggaacgggagtacagagttataccaattccgtagtccagtattttgccatactggcggctctgggaacggcttcttatgggcagagggagatcgcaagacacagagatgagataaagatacgcagccggcttttctgggagatcgaggtgctttgtatggcaacgaccgcagcatgtcttattatctggctgtttgtgatcggctttgccagggaatacaggccttattatgtggtattgacgatgacactgctggcagttgcttttgatatttcctggttttttggggggctggagcagtattccctgatcgttttgcgaaatacggcagtgaagcttgtgggcattgccatgctgtttttatttatccgggaaaaagaagatcttctgctgtatgtggcattgactgcggcaaccggacttctgggaaatatttccatgtggggatatttaaaggggcaggtggaaaagccggttttaaaagaactgcgtcctttgcgccatttaaaagagaccctggtgtattttatccctaccatcgctacttccgtctataccattttggataagactatgcttggctggttttccggggaaaataagtcgcagaacggttattatgaatatgccaccggttttgtgaatatggcgaaaatactgatcatgtcttttaatgcagttatgtccgcccgtatgtcctatttatttggaactggacggatggaagagatccataagcgtttccaggactcactggattttgtccttttaatggcaatgcctattatgctgggtctggcggggatcgcagcccagtttattccctggtttttgggaaacgggtatctgccggtgacatttttaatgtatgtatgcagtcctctggtgctggtggtaggtttaagtgactgcatcggcagccagattttaacgcctggtggaaaaagggcccagagcggcaaagtgatcgtagcaggagctatggtcaatgcctgtttaaatttccttctgatccctcattttgcagcgttgggagcagcagcagcgtcagtagcagcagaatgttttatcacctccctttatctgtggctgggaagagattttataaagctgaaaatgctggtgcgttatggctggaggcgtcttgtggcggctgttattatgctgggagctgtggtgtggacgggccagtttttggaacaggtccggggcctgggacctattaccacttttattcagatcggtgcaggcgcagtggtgtatttcctggtgcttctggtaatgcgtgatccgttcctgtatcagtatttagggaaaatatacaggcggctgacgggacagccataaaaaaatcacaggaatgccatgttatgtgagataaaaacagtttggaaggattgattattgggacatgctgagagaaaagccggaattttataaagaggaaatacgctgcggatacacggtagatgaaaaaacgaagcgtgtatgggcggtacagctggaaatgttagatgaggtggagcgcatctgcaaagccaatggccttaaatattttgctgacagcggaaccttgatcggtgccatccgccatgaaggatatattccatgggatgacgatattgacctggtaatgctgcgggaagattatgataaatttgtgcagatcgccccgaaatggctgaaagaagatctggtgctccagactgtgtatacagagaaaaattatcttcgcggccacgcccagatccgaaacagcaagacctgcggctgcaatgaagaagataaaaaggcgggatataactgcggtatttttattgatatttttccattagacggtatgccgaaaacggaaaaagaaagaaaaagctgggccaaaaagatccagttttattggaccgtgctttatacctggtaccgctttgattattatgaaaatgcaacggtttttggaaaacttctccatggcattggaatgcttctccatgttcccatggtcaaggcatataagggttatgaaaaactgtgtacccgcttcaaaggcaaagatacggaatatgtctgcgacactgtatttatccgctatctggaaaaaaacacctggaagcgggagtggttcaaagaagctgtttacatgccctttgaaaaccgtaagatacctgttcctgtaggctatgacggcagactcaccgccgaatatggtgattatatgaaaccggccaaagccccgactatgcatgggggactgatcctggatccggatgtgccctatacggagtatttgaaaaaagaaaataaataaggctttacccagatgattatttgaggtggaaaatttcgcacgatccacacgccgctggtacagacaagggaaacctgagagatgcaggagaagcgtgcgcctgccaaataattatctggtttagcatatataaagataaaagggctgttgcagaatggataattatttatctgttttacaacagcctttaaaagaattattcggttgtatcatcttctgtgtctaatagaacgtctcttgaaatattttcatcagtttaaaaatgacgcaaacgccgcttccttagaatggatcagatgtacccgtatggaagctactgcgcttggcaggtcatggtttttaatgtagttgatcagttctaagtgctccatggcggctactttgtggcgttcccagatgttttgttcgcctaagatgcggatacggatgctctggtcatagatctgggataagttcatgttcaggtatttgtttttacaggcatcggcaatggtgcggtgtaaggcgtcatcaatattgcagaagacaacagcatccttctgctctaagatatcactgcttaagatcttttttgtctgttcttctaagtcaagaagtttatccatatcaatatatttactgtaattttcaataatatagggttccatgagcagtctggcttcaaaagtcatggtgatctcttccatttggaaccattgacatcacagttgcagttgcagcaactttaagcggatttgacccggatatggacgtatttaactttctatatctgtttgactccagagaagaagcttttaaggtactggacggagaaacaggacaggaaatttttaaaggactggaaaaatagggaattgagacctatggaacctttgatcttggttttagaagcatgaccaattccagcagacccatcgttcatccggaagacgcaaagggcatccggatgagaatgctggaaagttccgtctgtgttgactctcttggagagctagggatcgatgcagtgtccatgagttttggtgaactgtttacagcactgcagaccagggtgttatcattcccacaagtatcggtctcatccagtacggtgtagcgacaggaacttctatcagtgatctgtttatggcaggtttccttccgggaattttcatctgtctggtgttatgtgtggttgcccacttcttatgtaaaaaacagggatttgagccaagcgaaagagctgccacagaggaaaaagttcaggcatttaaggatgccatcctggcactgctgatgccggtgatcatttcttatcttcattgaaacagatacagaacttacagggatcggagaagcagcaacctttggaagttccatggatgcaatggaatttgtagtagaaaaacagttaaaatcattacttttagatgaagatcccacaaagatcgaatttctccatcagaagatgatgtggaacaactgggcaaatggccgtcagggaatggtcatgggtgccatcagcggcattgatgtggctctctgggatatccttggaaaggtagcaaaccttcctgtgtgcaagttgcttggacaggtaagcgataaagtccagggatatgcagctgcctttttaattgccatgcatctacattttttccatatttatgaaaataactccgcgaaatgctcaaaatatgtttcaaatgtatcataaagcagagtttctaaatccctggtcaccggaggcatggtgcggatgggatgatgggccatgatgagaaaatatcccggggccggtgtaagaaaatggcggtcatccgggttatttgccattgttttagaaggcaatatggtgtttccaattccatttttttccagaaaaaaaagaatggatggagctgcttcacaggaagttgcagggaaagtcagatataactgctgaaacaggcgtttctgttcagcgtaaagaggatttccttttggaaccgtcataattttagtatgctccaggggatcagaaaggagatcatgtttggaacaatacacaagttcatcttcatccagaatgcggctgtctaaaataggatgttcttcttcgcaggaaaaatagaccccataatcagcagatgcatttaaaagtgactcctggatctgctcacggctgttggtgctcacattcagctggatatccgggtgctgtttcttaaaactgggaatgacctgtgtctggatgatgtgtagcagactggggtcacattgcagatagataccaccgtcatgtccctgctgataggttttgatgtgttctgacatttcttcctcgatctgtaggatgttgcgggcaaagtttacaaatacctttccggcattggttggaagtaatttgttgtgttctctggtaaataatctggcacccagcattttttccatgccgtgaagataacgggaaagagtaggctgggtcagataaaacttttcagcggctttggtcaggcttttttcatctacaatggcgatcacataacgaagaagctggggatttaagtttaactcagaatacccctgtacagaggatgcagctgcatgtccgccctgtatggaagcaggatcgtttttactgctcatatcaggatcagcagcctggagcagatcatttacttcttttgaaggaatgatctcaaaacgctgttctggattggactggatatcacggatcagaagaaacgcaaggtactgttccggttctgtcagtttatgtcccaaaggaaagcggatatgggtttcttggtatacaggcggatctaaggggagaaaaaccagttcgttacagggaacggcgtatttttttgatacaaagcctgctccggcagcatggtggagcatggagtcaacaatgatcacattatcggactcaaaggtaattacaggttcaaatccggcttctttaaaaagctcttctgcaagaatgcggatattgtgacgtggcccctggagtacgaacggcgtatctttcaggtcagaaagacggaccttatcggaagatgccagaggatgagccgcaggaagggcaaccaggagttcctcatgcgcaacggggatatcggttactttatcagaagattttccggagccgatggtaagatccacttggcctttcagaaccgcttctgtctgttcattggagtatcgttctgtgagagacagggaaatatccgggtaacgatccataaacgtctgatagatccggctgtagatcacagaaccacggttgggagtagttccaaggcggatacaggcatgatccctgttgatgatcgttcttaaggactgggaaagtctgttctgctcactgacgatcttatgtgcgtattcgatcacgcagcggcctacagaggtaggtgccagatgtcggtgataacggagaaagatctggaagccaagggaagcttcatattccgtaagaaatttgcttaaggcaggctgggagatctgcagtttctgggctgcagcggaaagatttccaagatccgctataacggtaaggtaataaaattgtcgtgttgtcatataagatcggtccctttcttattgcttctttaatatattacaaataaaatccatggaatgtaaaaaactggaatttactataactaaaatgccatgataagtataattattatagctttgtaaaatgagaaatacaagtatataatacaaaatataaagacgtatggcatggaaataagctaaaattgctaaaaaagccaacgcgggaacgtaataatattatatttaaaatgatatgaaaaaggagagggaaaacatgaagaaaaagttggtgggaaaacatggtattcaagaacgggaaaacatggaggaggcgataaaatgaaattcaaagaattcagaaagaagaatgtgggactgttgctgatcctgccgtggtggatcggatttgcaatctttaaactgtatccctttatatcatcattgatctacagtttccatgattacaaccttttcaggacagctactttttcaggcttaagcaactacaaaaaaatactgggcgacccattgatcatgaaggcatttatacagacctttaaatatgcctttcttaccgttccactggaattgatctttgctttgtttatcgcttatatcctgaattttaagatcaagggcgtgaactttttcagaactgcttattacatcccttctattctgggtggatccgtttccattgcggtattgtggagatttttgtttaagacagagggacttgtaaacatgatcgcatccaggtttggtatccagccctttaactggctgggtgatccaggcggagctttctgggtcattgtatttttaaagatctggcagtttggttccccgatggtgatcttccttgcagccttaaagggagtgtcaaaggatctgtatgaggcagcatccattgacggagcaggaaaatggagacagtttttcagtgtaaccattccacttatcacaccggttattttctataatttcgttacccagctgtgcaacaagttccaggaattcaatggtccgtttatcgtaactcagggaggacctcttcgttccactacattggtatctcttctggtatataacaatgcctttaagagttatgaaatgggtatggcaagtgccattgcctggcttctgttcctgatcatcatgacactgacaggtgtagcgttcttcagccagaagtactgggtatattattctgacgaggatgggaggtagatcgaatgtctcgtgaaacacgtaataaagtaaatatggtctggagatatgtcatccttctggcagtgggagttgtcatggtttaccccctggtctggatgatcggagcttcttttatgaccaatgaacagatattttccagcgtaagctgtataccaagattcccaaccttaagtggttacaaaaaaggctttgaaggataccagggaatgacactccttcatttcatggtgaacacttataagtttgtaattccaaaagtactttttaccgtagcttccgctacactgactgcttatggatttgcacggtttaactttattggcaaacgtttttcttttgcagtattgctgtccacactgtttctgcctcaggtagtattaaacgtacctcagtacatactctttgaccaggtaggatggttagactcttatcttcctattattattccttccctgttggcaggagatacctactttgtatacatgttgatccagttccttcgtggaataccaaaagaactggaggaagcagctgagatcgatggatgcggaattatgcagagactctggtacgtgatcgttccaatgctgaaaccttccattgtttcctgtgcattgttccagtttatgtgggcatccaatgattttatgggaccacttatttatgttaatacagtagctaaatatccggtatccattttccttcgtatgtccatggacgcagacgtaggatttgaatggaacagagtattagccatgtcactgatcgctattgttccttcactgatcgtattctttacagcacaggattcctttgtagaaggaattgcagcaggaggtgtaaagggatgagaaagggcaggatcattgacagtcatgctcatctggtccagtatattgccggaacgggcgcaggtggagagctgcgcagcataggaaacggaatggctgtctatgccaatggtcagaccgtaaggatgataccgaaggagtttggcggggatcaggtgacgccggaacatcttatacaggtaatggataaaaatggggtagaaaaggcagttctgctccagggcaatttctatggatatcagaatttctacacccatctggcagttaaaaagtacccggaccggtttgctggagccggtgcctatgatccattttccagagataaagatggtatacgaaggtacctgtttgaagaactggggtttaagatagaaaaatttgaggtaagcacaggctccggcctgatggctatccatcctgaactgaaactggatggtcctgtgatggatgaagcctgttcctatgcctgtgatcatggtcatgtatttgtcattgatattggaaaatgtggaagtgacagctggcaggttccggaactttgcaatctggttaaaagatacccggagatgaaatttgtggcctgccatctgctggctccatcaaacaaggataaagacaggctgcgctgggccttagaacagttacagctgccaaatctctggtttgatctgtcaagtgtggtccataactgcaggccggatgagtatccatatcccaaggccattgagtttatccagttggctaaggagatggttggagcagaaaagctgatgtttggcacagattttccatcggcactgaaagaggatgtatatggtcattatgttggctatatagctgactcgaccgtgttcacagatcaggaaaaagaacagattttttatgaaaatgcttatggagtgtattttaatcatcattgatgcagaagggagaaaacaaaaatgaagaaaaatgtaaaaaaattaggggcattacttctggcaggagcaatggctgtcagcacagtgggctgcatgcctacatctaaaccgcaggagtccacaggggaacagaatgcgcaggccagtgacgcgacacagggaacggaagaacctgcagcaccggaaggacttgaggttgatactcagactcctattacactgagactgaactggtggggcggagattccagaaatcaggctacgctggcagcaatcgataaattccaggagaaatacccaaatattaaggtagcagctgaatacgaggcatttaacggccatgaggaaaagatcgcattgggcatcaaatcaggcaatgcagcagatgtgatgcagttagactggagctgggtgtccacctactcaccaaaaggggacaacttctatgatctgaacaaggtatccaatatcctggatctggacaattatacagagggggataaatccgtatttaccatcaacggcaagctgaacgccatccccatcagcaatacaggaagagtgttctgctggaacaagaccacttttgataagatcggtgtggagatccctactacattagatgaactgttagcagcaggaaaagcatttgaggcatatgatgactcctactatccgctggttacaaaggaactggatcgtgcttttcttatggtttattacctgcagtgtaaatatggcaaagactgggtaaaggatggcgctttgcagtacagccaggaagaaatcgcagaaggatttgattttcttaagaatctggaggacaaccacgtaattcctactttacagaaggtagcaggagacggcgctgacctgatcgatacaaacgcaaactggatcgatggacattatgcaggcattttcctttatgatacttccattgtaaaacatgcagaagcagtaaaagacggcgagtttgtgatcggtgattacattaagatgggtgattaccacggcggctttatcaaggtaaaccaggcatttggtatcagcgcaaccacagagcatccggcagaggcagctgctttgatccagttcctggtagccgaagaagatggtgtaaagacactgggagatacccgtggtgttcctgctaacaaggctggactttctatgctggatctgagcggaagccaggtagcagaggcaaatgcaaaggtaatggaatggagcagtttccagatggatccaacctttgaaagaaactcctttacaggcgcagatggtactttctttaatgctcttcagctttcaagctatggggaaagtgattccatgtcctgtgcaaagatcgtagaagacggtgtagcaaatgagctgtcttccacaggattataagatctataaaaataaaaaagataaacggaggcaatgaagatgtttactttttcttttgaggataaaataaaatttacaaaagccgtatactatcatttccataaaattcccctaccaaagccttttaaagacggaaccggaggaatgggaaagttcgcaccggaacagggctgcattgaactgtatgaccaggaaggagcatgcgctcatctgtcagtaggtcctggatttattacggacattcttcctatgatcttaaacggagaagagcatagctacaatgagtggagaaacagtctttactggaagataagaaacgcaggatttcaaagcgagaaggctgtggaagtgggacagttagacctgatgatgctggatatcctggctcagagagccaataagcctcttcacagatttatgggagctacaaaagactgggcccaggcttataaaggcggcggttcccttcttatggaggatgatgagctggtagaagacatggtccggtatgtggaggaaggctacaccactgttaaatttaaagtgggaagtaatgacggtaccgatatggagcgggatcttcgcagaatcgaaaaggtccgtaaggcagtgggagacaaaatcggtgtagcagttgactgcaaccagagatgggatgtggacagtgcatacaagtttgcgaagctgtgtgaaccatatcacctggcatggctggaggaaccgatccattcccataacatgaacggaatccgcaggttaaaagaaatgggagtgaaaattccaatcgcttttggagagtccatgaggatctattatgaatatgaaacttatattgaaaaaggcgtagatcacgttcagccgtctgtaggcagaatgaccagaatggatgatcttatcaggatccgtgatctggcccgtgaaaaaggagttaaattcacatccggcggaagaatttatctgaatgccatttttggttgtttatacaacgaagatgagtggatcgaataccatgagccgatcagccgcccggtaggtgcttataccctgttccagcctgaggaaaagaacggccgcttctactgccaaccagatcttcctggtaatccacagcgtctggatattgcgaagctggaaaaagatgggcttatggagagcagagagatctattatccgaaaaactggtaagtaaattcgaaaaattcaagtttaataacgggagagaataaaaaatgaaagtaggatttattggtttaggaattatgggaaagccaatggcaaagaaccttttaaaggcaggttatcaggtttgtgtgaatgacttccacaaagaagcagtagaagagctggtagcagcaggtgctacagcaggtgcaaataacgcagaagttgcaaagggcgtagatgtagtcattaccatggtgccaaactctccaaatgtaagagctgctttattaggtgaaaatggtgttgcagagggagcagataaagataccgtagtcatcgacatgtcttccatcgatccagtagagtccaagaagattgcagctgagttaaaagaaagaactggcatggaaatgttagactgcccggtttccggcggagagccaaaggcaattgatggaaccttatctatcatgtgtggtggtaagaaagaggtatttgacaagtacactgacttattaaaggcaatgggaagttctgttgtatatgtaggtgagatcggctccggaaacgtagcaaaactggctaaccagatggtcgttgcagccaatatcggtatctgtgcagaggcaatgacctttgcaaagaaaatgggaaccgatccagaactggtatatcaggccatccgtggcggccttgctggttctactgttatggacgcaaaggtgcctatgatgttagctggaaattacaagcctggattcagaattgacctgcacatcaaggatttaaacaatgcattaaatgcttcccacgctatcaatatgccagtaccaatgaccgcacatatgatggaagtaatgcaggaattaaagaaccatgacgaaggcagctgcgaccatgatgacattatccgttactatgagagaatgaccggtgtttctattgtaaaagaaaaataattctttattgatctaagagggaaatgttatgaatacagattttatcaagggcgttatcgttcctattattacagttattgacgaagaggaaaaaatcaatgaagcagctatgcgggcacaggtagactatgtgattaatggcggccttcacggtatccttgcttttggctccaacggtgagttctaccagatcgaagaagaggaaatggaacgtggatttaagatcatggtagaccaggcagcgggaagagttcctgtttactttggaatcggcgcgatcaatacgaaaaaatgcgtccgccttgcaaaaatggcagtagcaaacggtgcagcaggcatctccattttacaacctatgttcttaaaacccaattttaacgaattgttcctgcattttaaaacaattgcagaggcagttccggaaattccggttctgttgtataataatcctggaagagttggttataccttaagtgcagatctggtagaaaaactggcccatgaggtgaaaaatatcgtaggtatgaaagatacctccggtgacattacccagacagaggaatttatccgcagaaatgcagatgtaggttttaaggtatttggcggaaaggacacactgttatatgccagcttatgtattggagctgtaggtggtgtgtgtacagccggaaactttatgccggagctgatcgtagatatttacaataaatacgtggccggagatctgaaaggttccctggcagcccagtataagttaaatccagttcgtctggcaatggatggtgcaagcttcccggtagctgcaaaggatatggctatcatgcgtggacaggcagctggaaaaccatatttaccaaatcttccaacaccagaaggtgcgtcttatgataagatgaaaaaagaaatggaaaaagcaggtctgatctaatatgaaacatacagttacattaagaaacggagtgcaggttccggccttagggcttggaacctggttccttggggaaaataaagcagcaagagcgcgggaaatggaaagtctgcgcactggcatttctgctggtatgacgctgatcgatactgcagaaatgtatggaaatggaaaagcggaaagtcttataaaagaggtcatttctgataaaaaacgggatgatctttttctggtatctaaagttctgccaaacaatgcggggaaacaccgactggaacaggcgctagataattccatgaagcggatgggcgtggaatacctggatctttatctgtatcactggagaggaaactatcctctggaagaaaccgtagcagagctggatcgtgtgaaaaaagcaggaaagatcaaagaatggggcgtttccaactttgatattgatgatatggaagaactgtggcagatcccggaaggcagaaactgcctggtaaaccaggttctttatcatacaggctccagaggcattgaatacagccttctgccgtggatgagagagcatgatgtggccttgatgtcctattgtcctctggcacaggctgggactttaagagagggcatcttaaacaacccggttttaaaagagatcgctaaaaagtataatgccaccgtagagcaggtcatgcttgcctggaatatccgggacggacataccattgccattccaagaagcggccgtgcggagcatacacttcttaatgcacaggcagatcagatccagctgacagaagaagattataaagctatcgaccaggcatatccgccgccagtaaggaaagaatatctggatatacagtaaaatttcgcattaatatttgaacaagatcataaaaggacaactgacgtttttagcaacgcagttgtcttttttgttgcttatcagtaattaggtgaaaaatatattgtatgcaacaaaaataagtgataaaatgaaatagataaaatattatctgtttttaatataaaactaatattttggataaaatattagcagaaagataaatggggtgtctatggaacagcttatatgggaaacagcagaagaactggatcagaaacttgcgcagagagtgcgtaatatcaggaaacgccgcttgatctcccaggagaaattagcatctttaagcggtgtaagctatggttcgatcaagagatttgaagcgacaggacagatctcattgatatctttgacgaagattgctatggctttggatatagcagatgaactgagaaatatttttacgcaggtaccgtacagagatatccaggaggttataaatgaaagaagataatgtgctccaggtatactatgaggaaaagcgtgtgggaattctggcgctgacagcggatcataaagcggcttttcagtatgatgaaaaatggctggaaaatggtttttctatcagtcctttttcacttccactgaaaaaacaggtatttttaccaacaaaagattatttttcaggtctttttggagtgtttgcagacagtcttccggataattggggaagattgttgttagaccggttgatccgggcacataagcaggctccagacgaactgacagttttagatcgattggcaatcgttggaaagtcaggaatgggagcgctgacttattatcctgaaaagagtttttctgagcagacagggaatttggatttagatgaactggcagaagaatgtcagaaaatattgaatacagaatattcagataagttggatgaactgtaccgtctgggtggcaccagtggcggaacaagaccaaagatcatgactacgatcaatggggaagaatggatcataaaatttcctgcccacgtagatgggaaagatacaggaaaaatggagtatgattattcctgctgtgccagacaatgtggtattgttatgagtgaaacaagattatttccttctgacaagtgcaaaggatattttggaacaaaaagatttgaccgaagaccagatggaaaaaggctccatatgctgacagcggcggcacttttagagttagattttgaacagccaagtctggattatcatagtttgatgaagctgacaaaaatactgacaagagataacgcagaagatatggaaaatatgtttcgtaggatgtgttttaatgtatttgcccataaccgggacgatcattcaaagaatttcacatatttatatgatgacaaggaagataaatggcatttaagtcctgcgtatgatcttacctacagcaatacctattatggagaacatacaactacggttgatggaaatggaagagatccgggaagaaaagaacttctggcagttggaattgcggcaggcatgaaaaagggaagctgtgaaaagatcatagatgaaatacagacatatgtgaaacagatgttgagggaatatttggaaagatgtcagtaaaatattgtaagaagtcatggaggcagttatgaagatcgaacacattgcactttatgcaaatgacctggaaggagccaggaaattctttatgaaatatctgggtgcacagtcaaatgatgggtatcacaatccgagaaccaattttcgctcttattttctttcatttgatgatggcgcaagacttgagatcatgaataaaccggaaatgacggatctgccgaaagatctggtacgcaccggatatgcgcatattgctttcagtgtgggaagtaaggaaaaggtagatgccttgactgctcagttaaaatctgatgggtatgagatagtcagtgggccgcggaccacgggagatggttactatgaaagctgcattgttgcaatcgaaggcaatcagattgaaattacagtttaagtctgacaaatcagatcacatttgtcaggatggagcgtatattggcaatagacgggaaaaaatcttaagggtaaagacagaaagatgaaagaagaatattatcagattggcgatgtcagcagaattacaggaatatcaaaggataccttacatttttatacaaagatcgggctggtaacaccggattatataaatccgaaaaatcattaccattattattccaggtggaatatgtaccagttagatattattgctacctgccggaatttaaagataccactggaaaaggtaaaagagatcatatcctccagagataatgaaaaagtagtgaagctgcttatggaatatcagagtgaagccttaaggctcagtcagtattacaaacaggtagcagatgatatcagctggtattatgaggaaaatgaacgcattaaaacacaaatgtctgactgcaaagtacatataaagcattttgggccggaaacagttattgtaggaaaccagaaacggaaagagtcgtcttatcatgcaaatcttcaagatgttttaatctaggaattccagacaacaaatcttgtccgcagaaaatatggatattttctggatacggagagatttttaggaaatgaacttagaaaatatcgagaatatataaagctgccagatggtgattacagcgctataaagccagaacatttatatacacttcctggcggaaattatgcagtctgcacaatacctataaaaaatgaaaaagccgatttttcaccactgatccattggctgaaggaaaagcattacagaacagatgctgtttttgcagagaaagtaggatttcagctgttcaaatatatttatcactactactgtgagataaaaatacacctggtttcccaataaatcctgttgacagtggagttactacacggtttaaaataccttctgaagaaaattcaggaggttttttgctatggatgtagagaatataccaatttttcacagaggatgctgtaactgtattagggatatattataaaatacagtcattcttttttattttgctccttggcttccaacaggtattactgccattattcagttatcattatggagcaggcgattttcagagaaacagggaaattctgaagtactccatgatgttttccgtgggtattatggcagtggcaacagggatattttttctgtttcctgagaaacttgtacagatattttctacagagtctgcgatcgtggcaattggtaactatgcatttccagtcatttctgtcagttttgtttttgcaggacttaccatcgttataacatcctatctacaggggatcgaacatataaagttaagtctttttatcattgtgttacgccagatcattcttcttgttccgctggcgtggttatttcattttataagtttaaatgcagtgtggtggacatttccggttacagagatcattgccagtatagcaggtatatttataatatttatttcattaaaacatcagtaaaataatgtagagtaaaaattctggacaattttcttgttttatgttatataataaatcatgacttttttctgccaccgggtagaaaaaaataagcgtcagagtttctatcgttaggtcttagaagatagaaaccatggcgctttattttttatgtactaggaaattccgttggaactccctagtacacaaaaaggcacgacctgccaacgatgcgcactcgcgcgatgaggaagtttgtcgcaaacgaccgcgctcggcgcgagaatgtgccaaggcacattcttatttataaacctataaaaatcaagaaagggagagaaaaataatgttcagacctatcaggaaaaagaaaaatgagatcagcacagatgaagcactggctttgctgcaggacagccgcagaggcgttcttgccgtaaatggtgatgatggttatccttatgcaataccggtcaactattattttgataaggaaaacagaaaaatttattttcatggagcacgtgtgggacataaggttgatgcgctgcgtgcctgtgataagatatgtttcactgtttatggacatgaaacgatcaaagaagaagcctgggcaccatttatgcagagtgtagtggtatttggcagatgccatctggtagaagccggagagaaggctatggcaatgttgaagcaatttgccatgaaatattatccaaatgaacagatggtagatgaggagatcgcaatcgcaggtaaagcagtacagatctttgagatagaaatcgagcatttaagtggtaaagaagtgcaggagaaataaaactgcggcggtgtgatctgatatagaggtttacggtataaaaaatacctcccggttcagatgatataaaattcatctgtttcaggaggtatttttatatacatacaagatctgttattatcaactgttaacagatattactgtaatccattctccggtacgtttgcatcagtaggatcataggtctgtgtatccgggatcatggtcttgatgaccggacggtcaaatggacctgggatcggggattcgtatacagtgatggaagttccaagtgcgcagtgttcgtagatccagcgggaatctgcggtagtcagacggatacatccgtgagacttggtagcgcctaaatagttgtaagtaaatgcttttaaggtatacggatctggtctctcataaataacagagtgaagaaggatcgggatacctgcatccagacgggtcaggtactggcagtactcatcggtgttcatcagtctccagcgatatttctcaggagtcttgtgctcacctaaaggagtatcatcaccggtggagcacaagaaggacttgtacgggatgatatagccattatcaccatctggaatataaatggtcaggcagttcatctgcttgttgatcttgatcttaaactgaccctgataatttaagtaaggctccaggtcagttaccagcttgccgtcaccttcaaaatagtacttgtagccatctatgtactgccatccggttacaatggcattgtcaactacataataacggtctctgtcattccatacccatccggtaaagttgtcgccggtaccattgctgaatacaggagtgccgtttacaaactggatgccgtcaggagcagcggatactaatggattgtccatcttgtaagcagcgccgtcaactcctttgccccacatggagaagcgcatgccggtgataatgcggccgcaggccatagcgccgttggtgccgccgtttttagaccagtcacattctgttccgtcagaaagattggagcggtaataaacatcaaaacggtcgccgaaaataccatttaaacggatctgtacggcttctacagggcagtcagctgaccagtctgtatgtccgccgttcatggcccagttggtccagccacgggaactgctgtaggtacggtaaaggacatcacctggaagattgtttgcatagatgcacatacttaaaaatcctgcatcacccacagaaagaacagagtcatcacggaccggatcactccatacctggtcagaggcacgaagaagctgtacctgtaagaaagcttggttggtcggaacctgggcagaagtgtcttctgtaacggtttctgctgcagtagtagtatctgtggttgtttctgtagtagtttccgtggtctgagaggtctcagactgggaagtgtctgttgactgggaagactcttctacaatggtagttggggaagtattgtttccagatgactgggaactgtcactgttatccccaggtgcctgtaaagatacttcagtggattttcctgaaccaggaccattgttggtgtcatttttgaatgcaaaagcagtggtagcctgtcctgcgatcagtgcagaggcaagagcagccattgccagatgtttaaaagttttacgcataatagaacctcctacggttagttacatgttattgtctgcataaaatgagaacaataaccatactgcctttaatttatcataattgggggaaaaatgccatataggatttacattttaggacccgtattgtaaaatcgtaaataaaatgaccatggaatgtaagaaattaaatgtattatggaacagaaggatctgtcgtcggcaggcgacatcatcatgaataaaacatgagaatggaaaagacaatgaaagaggctgtaaagactataaaaacgaaagaacaggcggtccacattatctatgcttccaatgacggctatgctggacatctggcggcatctttgtgctctttgctggacaataaccgccatataaaaaatctggatatatatgtgctttctgcccagatgtgtgaagcgtttcaaaaccggcttaaaacgctggcagccggttttggacgtcagctttatgcggtggaactgggagatctgaaagaaagatttccttataaaatagatacaagaggctttgatatcagtgccatggggcggctttttgcgccagaagtactgccggagactgtgactaaggcattgtacctggactgtgataccattgtctgcagttccattgaaaaaatgtatgaaacaccgctgggagactgtctggcaggcatgatcatggagcccacggtctataaagaaatgaaagagtccattgatatggataaagatgatgcctattttaactccggtgtgatcttaatggacttggctggctggcgcagggaaaatgtgctgaagaaactgctggatttttacggggatcatgcaggaagcctttttgcctgtgatcaggataccattaacggagcattaaatgggcgcattttacctctttccccgaggtataatttctttaccaattaccggtatttccgttataatacactggtgcagctttgtgatgcttaccgggcggtaggtaaaaaagagtttgctgcagctaagagaagaccaacgatcattcattttctgggagatgagcggccctggatcggtggcaaccacaattattatggaaaatggtatcggaaatatctggctatgaccccatggaaggacatgcctatgcaaaagggtaagttctggtatatgcagctttggtggtgctttaaccagatgacaagggtatgtccggctctgcggctggccatcagcaaacggctggggatgaaagttattgacaaccggaagaaacatcagaaaaagtaagatattgaagaatataaaattaaaagaaaaaacagtgagagaaagggactatggacgcagacacgaatatatgtgccgtaatattaaattataatgatgcacagacaaccatgaaacttacagaaagctggaaaaacagcaaagtgatccggaatatcattattgtagataactgttctaccgatgactcctgggaaaaactgggagaatttaaagaagaatttgcttcagatcatccggatgatccagataaagtgcagcttcaccttttcaggacaacagaaaacggtggctacggaagcggaaaccaggcggggatcgattatgcagtccagtatctggaaccggattatattatcatcgcaaacccggatgtgcaggtcagtgacgcctgtatcctgcgtgtggcagatgctttagagaagcaggaggacggagctgtagcttctgccatggtagtggatgtaaagggacagtcctctttcagctactgggatctccagtctgtgtggctggatcttttagataccggtcttgtgaccaggaggctgttccgtgcctttttgaaaacgccgttagaaaagctgcctctggcagcagatggtgtcagtcgtatggtgggggctcttccaggctcctttttcatggtgaaaacaggctgttttacgccaggagatttaaaagaactgtttgataaacatgtatttctctattatgaagagaaaatattaggacagaaattaaaacaaatgggattaaaagagcttttagtgacagatgcttattatgtacatgcacattctgtaagcattgataaaagctatacaaagataagtgataaacagaagctccttcataagagcaagttatattactaccaacattacctgaaactgggagaaatggaactggctgtggcaaaagcatttctggcggtggtccttacagaagtaaaatttctcacaggtgtcttgaagatgcgctggtaatgatggataatggatatcaggataaaagggaaagtgttacaaatcagcgcatggctgaactgtaacagagtattgaggaacagagacaatggataaggtacttttggtcataccggcctacaatgaaggaaaaaacattgagagggtggtagaccacattaaaaacgattttccggaactggattatgtggtggtcaatgacggctccaaagatgatacagccgatatctgtcgcaggcgtggctataattttattgacctgccggtaaatttaggattggctggctgctttcagaccggtatgaaatatgcctggcagaaaggctataattatgcagtacagtttgacggcgacggacagcaccgcccggaatacattcaggcaatgaaagaaaaaatggatgaaggatatgacattgtcattggttcccgttttgtaacagagaagaaaagctggtccatgcgtatgtttggaagccgcctgatcggaacggcaatctggctgactacaggggcaaagatcaaagatcctacttccgggatgcgtcttttcagccggaagatgatcggtgaatttgcctggaacttaaattatgggccggaaccggatactgtatctttcctgatccgccagggagcgaagatcgcagaggtgcaggtcaccattgatgaccgtacagcaggagaaagctatttgaaaccattgacagctgcaagttatatggtgcgcatgctgttatccatactggtcatccagaatttcagaaagcgttaaatataagggattagatatgaaaaatcttacgaagcagttattatataagggagataatgttgcaagagccaatgtcgtgtggaatattgcaggcagctttgtctatgcttttgcaagtatggtcctttcttttctggtcatccgcatggcaggagaggaaaaaggcggtattttctcctttggttattctacgctgggccagcagctgtttttagtggcctattttggcatccggcctttccagatcacagacggaaagggagagtattcctttaaggaatacagagaacatagaaatataacctgtatgtttgcactggttgcaggtgcgctgtttctcactgcaaggaccattgctttccgtaaagggatcggggattatacagcgggaaaatgtatgatcctgcttcttcttgtgatctataaggtcattgacggatatgcagatgtgtatgagtcggaatttcagcgtcagggatgtttatatcttacaggaaagtctaactttttcaggactgttttttctgtagcagtgtttacagtgacgctgggggcatttaaacatctgctgtttgcctgcctcatggcagtggcagcccaggctatgggtgtgttcttatttaacctggatgtgatccatgcattagatggcgtggactggacctttacaaagggcaaagtgacgaagctgtttaaaaatacgggatttttattcatctctgtattcctggatttttacattttctcttgtgcaaaatatgccattgacgcccggatgaacaatgcggcatcgggatattttaacttgatttttatgcctacctctgttatttatatggtagccaatttcgtgatacgtccgtacctgaccacacttacaaatctctggacagaagaaaagattgctgagtttaaaaagacactggtgcgtattgcggctgttattttagggcttactgtacttgcagtggcaggtacacttgttttaggaaaatgggcactttccattatggagcttcttatgggaggcgaaaagggaacgttgaccgtttattttggggcatttgcagggatcgtccttggaggcggtttttatgcactggcaaatctgatgtattacgcactggtgatcatgcgaaagcagagaaccgtgttttttgtatacgcagcggcagctgtagcagcgtttttcctgtcaggaggccttgttggggcttttggtattaacggggcggcgctgtgttatctgctgctgatggcaggagaaacggcaggttttggattttgcactgtaagatcctgcaggagtgaggaaaaggagacaagacaatgacagaggaaagaaagagtgaaaatgctcttcgcaagccacgggtcgatgtggtgattcctacctataaaccaggtaagaaattttccagacttttaaaaatgctggagaaacagacctatcccatagggaagatcattgtaatgaatacagaaaaggcattctggaatgaaaagggctttgaagggatcagcaatcttcaggtccaccacctgacaaaggcggaatttgaccatggtgccacaagaaacaggggaatgcgtttttcacgggctgatattgtggtgtttatgactgatgacgcagttccggcagatgaatttttaattgaaaagctggtgggagcatttgaccagagaggtccggaaggagaagcggtgatcatggcttatgccagacagcttccagataaggactgtcctctggcagagcggtatacacgttcctttaactatccggaggaaagctgcttaaagacaaaggcagatttaaagcgtctgggcattaaaaccttctttgcttccaatgtatgctgtgcctatgaccgggagaaattctggttccagggcggatttattaaaaatgccattttcaatgaagatatgatatttgcaggaaaggcagtcatggaagacgattatgccattgcctatgtggctgacgcaaaggtgatccattcccacaattataactgcacccagcagtttaagagaaactttgacctggctgtgtcccaggcagaccacccggaggtatttggcggtattcgctcagaaagtgaaggcatccgtctggtgaagcagacagcccattatctgtcagaacagcataaaccatggctgatcccgggaatgtttgtaaaaagcggttttaagtacatgggataccgtatgggaaaggcatatcacatgcttccccagtggctggtcatgaaatgtaccatgaaccgggaatactggctggagaaaaaagaaggcggtgacagacgatgatgacaatgatgcttcgcgtggtgctgatcgtggtttctgttatcaccatgacatttatgatgcgcaagatacgccaggcaaaagttcagatcgaagctgccatgttctgggtgatcatggcgctgatcttagtagtatttgcagtggttccaggagctgcggatctttgcgcaaggttgttaggcatttattccacaccaaactttctgttcctgtttatgatctttttgctgatcgtaaaggcatttggtatgaccatccagttgtcccagcttgagagcaagcagagggagctgatccagaaaatggctctggagcagaaattcctggaagaaaaagaggcagagctggaagaacgggaagctgcgttagaaacctgcgggaaaggtgagtaaaagataaaagggaaagaaatgatgaaaaagaaattacctgtctggcttttatggcctttcgccgtgtttcttctgggaatatggcatttgctggatgtgcgggcatctgtaacagagacaggccaccactggctttatggctggtatgggggcctgtttttcgtgagtatggtgatattggtcggctttggggtgttgatatttggaaaaaactggggattttttgacagcgtttccagtagatgcgggaatgcactggttttaaagaaagaacttgtctcacggaaagaatctggttcaaagacagaatgctggaaacttccaggtctgtactttggagtggtcatgtgccttggtattttgtatatgctggtcctggcgcctctttcagcaccggatgaagtcagccactatatcagcgcctatgagctttccaaccgcttcttaggactgccgggaacggatgaagacggttatatttacatccgggcagaagatgactggatcgaggatgtgaaccaggaatttcgggactggaaggaaaaaagtgagcaagagtctttgaacggggaaaatggggagactgaggcaggaaaacctattattctgggacagaccttaaaagaagaaacttatgcggcaatccatgacgggggcgcggtcagtgatcagagcgcagaacagtctgtggctggtgaaagcgcaggcaacagtggcaaaacagccggtctgagggtttcccgccagccgtccgttcggaccaccccactggcctatgtacctcaggctctgggttttactctggcaagagtacttggacttaacagcatcgcccttttatatctgggccggtttttgaatctcctgctttttgcggcagttggtgtgttgaccataaaaaggcttccctttggaaaaaatgtatttttcggcgtgtccattttaccaatgagccttcatctggcggcttctttatcttatgatgttgtgatcctggcatttacaggatattttacagcagtgtgcctggatctggcctataaagcggacacagtgaaagtgaaagatgtgatcgctctggctgtggtcatggcagttatgggtccctgtaaaatggtatatggtgccattgcaggcttctgtctgctgatcccggtaaagaagtttggcaactggggaaaatggacggtctcagcagcagttgttcttggaagctttttagcagcaatggcagtggtaaatttaaggacggttgccatgtatacacaggaaagtgacagctatgttgcctgggccgaagaagcgggatattcctttgcggaattgctccaccagccggtccgtgtactgcagctgttttataatacagttgcatggcagggagaaagcctgtattcgggaatgttaggagagtccttaggcaaccgggatgcagtgttaaataccccttatgtggtcattttattacttacagcatgcctggtgatcctggtccttaaaaagccgggagaagagatctttatgaaaataaaagaacggctctggatctggtttatctgtctggtgatcttcgcagcactgatgttttccatgcttcttgcatggacgcccaaaagctccaacatggtccagggagtccagggaagatacatgcttccactgcttcctgttttgctgcttacccttaaaaatcaaaaggtagtgcggacaggaacagatgaccggctggtcctgtatactatgatggctgcagatgtgtatgtgatcctgcgtatttttgcagtggtgtgcctgagattgtaaggattttaaccctgtacagcagataacatgcggtgaacatgttgccggcaaggggataaacagttgcagacttgttgataacgtggtaaaatttccagatgaatgtggaaaatttataatcgataaatagaaacacaaaattagaaaaataaagaagataaaggagaaacattatgggaaagattaaagtaacaacctgtgatattgaaggactttatgtgatcgagcctactgtattcaaagacgaaagaggctacttcatggaaacttacaaccagaatgactttaaggaagctggtctgaacatgactttcgttcaggacaaccagtctatgtctgtaaagggcgttttaagaggacttcatttccagaagcagtatccacagggcaagctggtacgtgctgtccgcggaactgtatttgatgtagcagtagacctgcgttccgattccaagacctatggaaagtggtttggtgtaaccttatctgctgagaataaaaagcagttttatattccggaaggttttgcacatggcttcttagtattatctgatgaggctgagtttgcttataagtgtactgatttctatcatccaggcgatgagggcggtctgttatggagcgatcctgagatcggtgttgactggccgatcgaaccaggtatggagctgatcatctccgataaggacaaaaagtggagcggtttaaaggatacttttaagttctaagacagttctgccgggaaaaaagtataaggaaacgaatttatgaattacgcattgtctcttttaaaagagatcattaaaaaaagaaaactggtatgggatctgggaaaagcagattttcgcaagcgttttgtaggctcctatttcggtattgtgtggatgttcatccagccggtagttaccattgtgatctatgcagttatctttggtatcggctttaaatcaccgccgcctgttccgggagtcagctatgtgatctggctggtaccgggtattgttccatggtttttcttcggagaagccttaaacgggatcacggggtgtcttcaggaatacagctatctggtgaaaaaggtagtctttaaagtagagatattgcctatgatcaagctgatctcctgtctgctggtacatgcatttttcgtcctcattatgatgatcatgtatctggtggcaggaagaatgcctatgctgtcctggatccaggtgatctactacagctttgcggcgtccatgctggcactgggattgggatattttacttcttctgtgaatgtatttttcaaggatatgtcccagatcgtaggtatctgccttcagttcggtatctggatggctccgatcatgtatcatgagtccatgtttaccaaccgcttaccatggatcgaaccattatttaagatcaatccattttattacattgtaaccggttataaggacagtatgatcacaggcaactggttctgggaaagaccgaaactgaccatttattactgggtcttcactcttttagtatttggagtgggacttaagatgtttaagaagctgcggccgcatttttcagatgtgttgtaggctgtaagcggaaaatgtgcctggtgacaggcagaaaaaggaagattataccctcagtacaaaaagaaattatattcattttgtgccgggggtatttttaaaaatcaaattttgcagagggatatgcgtttttgtgatatgttatgtttgcaggacaggaatgaggtgataaggtggtaagcaggatcgaagttggctggcgccagggagaaaaagagggaacgatcccggtagatgtggtatattccaaacggcggaccattgggctggaagtgcaggcagatggaaaagtgctgatccgcgcaccaaaagggatcactaaaaaagtgctgatggattttgtaaatgaccgtcaggaatggatcgtggaaaaatggttcctgatcgagaagcaccgccgcaaaaaggcagaggctccaaagccagattatgagggaaatccggaagtagaggccttttaccgccgtgctgccagaaagaagatcacagagcgaactgcctggtatgcaaagatcatgggtgtcacctacggccgcatcagcatccgcgctgcaaaaacacgctggggcagctgcagcggggaaggaaacttaaactttcactggaaactgatcctcatgccgccggagatcttagactatgtagtagtccacgaactggcccacagaaaacagatgaaccattcgccccttttctgggcagaagtagaaaaagtgctgccagattataaggcaagacgggcgtggttgaaagaaaacgggagagactattgaggcggggtctgtatcagatccgccaatgtgatcccatcaaaaaattcattgatcatattgtccagtttctgccataccggatgggaggggcagatcccttttctgggacagtcgtgttcgccatcatcggtgcaggctacgggagccagggaaccttcggtgagccggagtatttcccccagcgtataatcttccggtgcttttgtcaggcggtagccgccgccacggccccggagtccggtgagaagtttatcctgtaccagtacttttaatatactttccagatatttttcagaaatgtcctgccgttcggcgatcacgttcagaggaacatagccgtctccctgatgctgggccagttctaccatgacccgcagggcataacggccttttgtagaaacgatcattatcgaattctcctttattcaaaatagttattatagttatttatagtaattctttaaacacatatctttctatctctttgaagattaccatatagtatacaccagaaagcatatacttagcaagctgatatgaaaattaatacctattgacaaactaggtttataatactattataaatgtgctaaataaaccaattacatgagtaggtttataaaaatgtcctcctgatcatgggagaatatgatgagaaaggaagtacggtcatggcaaaagaattactggatgtaaaacagttatttgtaaatgtagaagataaagagatccttcatggagtagacttaaagattggaaaaggagagacccatgtattaatgggaccaaatggtgcaggtaagtccactttaggctatgcattaatgggaaatccaagatatcagctgacaaatggtgagatctggtttcagggaaagaagatcaacgaggagccggtagataaaagagctaaagctggcatgttcttatccttccagagcccactggaagtaccgggactgtcattaagttcctttatccgcagtgctttagagcagagaagaggagagcgcatccgtctctgggatttcagaaaagagctggcaaaggcaatggaacttttgcagatggatccgtcttatgcagaccgagatctgaatgtgggtttttccggcggtgagaagaaaaaggctgagatcctgcagatgcttatgttaaagccaaatctggcaatcttagacgagacagactcaggtctggacgtagatgcagtccgcactgtttcaaagggcgtggaagagtatcagaaagacagagatggctctttactgatcatcacccacagcacccgtatcctggaagcgctccatgtagattacactcatgtaatggtagatggaaagatcgttaaaacaggagacggctctctggtagaccagatcaatgagaccggatttgaggaatttcttaagtaaaaggaaaatgtaaatatgccctcaggcagtttacaaagcagattataagtcagattataaacagtttccggaaaggaaatcgaaagcatatggaagaaaaaacacagatcaatgatatagacagaagtatttatgacataaaagatgaagaaaaagacgcctataggatccaggcaggtctgactccggagatcgtagagaaaatttccagggaaaaacatgatccggcatggatggagctgttccgtctgcaatctcttcagatctacaatgaaatgaaagtaccggactggggcccttctattgaaggactggatatgtccaatatcgccacctatgtccgtccaaatacaaaaatgactgcaaaatggtctgaggtcccgcaggatattaaggatacctttgaacgtctgggaattcctcaggcagagcggaaatcactggctggcgtaggcgcccagtatgactccgagctggtttaccacaatgttcgtaaagaagtggaagagcagggcgttgtatacaccgatatggaaagcgccttgaccggtccttatgcagacatggtaagaaagcattttatgaagctggtaaagccaacagaccataaatttgctgctcttcacggagctgtatggtccggcggatcctttgtatatgtaccgcctcatgtatccgtagaaataccactgcagtcctatttccgtttaaatgcaccgggcgccggacaatttgaacatacactgatcatcgtagatgaaggtgcagaccttcactttatcgaaggatgttccgcaccgaaatacaacgtggctaaccttcatgcaggctgcgtggagctgtttgttggaaaaaatgcaagactgcgttattccaccattgaaaactggtccaagaacatgtataacctgaataccaagcgtgcacaggtagaagaaggcggcgttattgaatgggtatccggctccttcggttcccatgtttcctatctgtacccaatgagcatcttaaagggccgtggggcaagaatggaatttacaggcattacttttgcaggaaaaggccaggacctggatacaggcgcaaaggtagtccatgcagcacctgatacatcatcctttatgaatacccgttccatttccaaggacggcggtgtcagcaccttcagaagctctgtttctgtaacaaaagaggcaaaaaacagcagatcctccgtttcctgccagtctctgatgttagactccatttccagatccgatacaatcccggctatggatatccgtaccaaagatgcagatatcggccatgaggcccggatcggacgcatcagcgatgaagcagtcttttatcttatgtccagaggcttaagcgaagaagatgcccgtgccatgatcgtcagcggatttgcagacaatgtttccaaggaacttcctctagagtatgcagtggagatgaacaacctgatccgtctggagatgaagggaagcattggttaagcaaaggggtactggttaaaggaaaggaggtcccatatgagtcagggacttgatatgacagtaaacagccttccttccagaacatggaactggctgaaaatgaatgagagtaagttaaaagagatagaagcaggagatacctgggacgtaaaagaagtagccggggagtcaaaagaaatagcttgtctgacagaggacgcagctgaaaatcaggaagttttctcccatatccacacaggaatgggtccggatatggaccgtttaggaaaaatggccggatcacaggcaatcatgataaaaagcagtccaaagtctgagggaggatctgaaccggtccgtcttcatttttcctgtgaagataataaaaagagtttccagaaagtggaaatcctggcaaaagagggagaagaagtaactgtccttatggactatacttccccggaaaaaacatcttccggtctggcagctatccagacaaagcttcacattgaaaaaggggcaaaagtacgtctggttcaggtgcagctgttagggaatgagtatacattattaaatgatattggcgcccagtgtgaagatggggcccagtttgaagtgttacagctgtttttaggaagcagcaaaacctattccggctgtcaggcagatcttttaggaaaagaaagccattttaaagcagatatcggttatcagggaaaaggcagccagcgctatgatatgaattatgtggcagtccataagggcaaaaaaaccgtcagtgaaatgaacgcggacggcattctggacgatcaggcatttaagctgtttcgtggaaccattgatttcaaaaatggttcttccggctccaagggagacgaaaaggaagacgtactccttatgggggacaatgtagtcaaccagaccattcctctgatcctttgtgcagaggaagacgtagaaggaaaccatggtgcttctattggacagttagatgaagaaatgctattctatctgtcttccagaggcatgagtgcagaaagcgccagcaagatgatcgccagagcaaggatggatgcagtctgccagaagatcggcgatgagcagttagaaaagctggtacaggactatttagaggaggaataacatgagcagcaacccatacagaaaagattttcctcttctggaaaataataaggtgatctatctggacaatgcagccacctcccagaggccggaggctgtgatccaggcagaggcacagttttatgaaaaatacaacgcaaatccattaagaggcctttatgagcttagtgtagaagccacagactgctacgaagaagcaagagaaacggtccgcaagttcattggcgcaggaagcacagaagagatcattttcaccagaaatactaccgaaggcttaaatctggtggcttacagctatggtctcggccatttaaaagcaggagatgaagtgctggtaagcattatggagcatcacagcaatctccttccatggcagatggtatgccgtcagaccggtgcaacgcttaaatttctggaatgtgaccagaccggatttttaagtgatgaaacactggaaaatgccattacagataagacccgcctggtagccattgcccaggtatccaatgtactgggacggaccgctcccattgaaaagatcgtaaaactggcaagaaaacatggtgccgtagttgtcatggatgcagcacagagtgcgccacatatgccaattaatgtaaaagacctggatgtagattttatggcattttccggtcataaattaatgggacctatgggcatcggtgttctctatggaaagaaagagctgttggaagaaatgcctccattccttacaggcggagagatgatcgactctgtcagccgtacaggtgctgtatttgctccacttcctcacaaatttgaggcaggtaccgttaatgcagcaggtgcatggggactgaaagcagccattgaatatctgcagcagattggctttgatgagataaagcgccgggaagaggcgctgacttccagagccttagaaggccttaaagagatcccacatgttcatgtgttaggctctgaaaaagcagaggaacactgcggtatccttacatttaccatagacggcgtacatccccatgatgtaagcgccattttagacgcagacggaattgccgttcgtgccggacatcactgcgcacagcctctgatggagtatctgggcgtttcttctaccacaagagccagccttttcttctacaatacagaagaagagatcgatgcttttgtagaaagcatgaagacggtaagaaggagaatgggttatggagagtagaaatttttacaatgaaatattaacggatcacaatctgcatccggtccacaaagaagatatcccggatgccaatctggtactggaaggcttaaatcccagctgcggtgaccacatctggttaaagttgaaagtagaagacggcatcatcaaagacggtggtttcgtaggtgatggctgcgccatttcccaggcatctgcagatatcatgttggatctgatcatcggtaaaaagaaagaggaagccgtgaaactggcagaaagtttcttaaagatgatcaagggaaacgcaacagaggaagatatggatgccctggaagaagcaggggcattacaggatatttcccatatgccggccagagtaaaatgtgctgttttgggatggcataccatggaagaactgttaaaagaggaaaaatagatagaatgtatatttacagatcctattaaatatgggctcgccagtatatggcgggccctacagatgcgttaaatgtgatcacacctgttgtactgaccgctctgggactggtacttcctgagatcgcaaagagagagcagaaaaattagtttacttgtttaacacgttatggtaaaataaccaacaacaaatgttggtattaatgtttatgacagtgatcagtacattgtttcgtaaacaatgtaccagggattttttagggacttacagagtattatgggaaagcttgattatcgaactttaagggaaaatgtagcagacgagataaggatgaagatcttaaacggtgatatgaagccgggagataagatcatagagcaggaactggcgtcggaatttggcatcagccgtggcccggtgcgggaagcactgcgtcagctggagcaggaaggtatggtggaatattccagaaatgtgggctgctcagtaaagcatataggcatggatgatgtttatgagatatactacatgcgtgctaactatgaaatgatggcagtaagactgtataatgctccttttccccgggaaaccattgagaaaatggaacaggttttagagcagatgaaacagcttcataaagaagaataccgcaaggtatttgaactggataatgagttccatgaagcgatcctggaccttgtaagtttcaagcgcctgaaaaaagcctgggaagacttaaattacggaaatattgtaacggggtacaatatggaaatagacagtgaacaggtcatcaaacgtcagtatcttatccacgaaaagctgttaaatgcctgcaagaccggcacaccggcacaggtagaacaggctattgcagatcattatcttgggggcgtggagaagctgatacagaaagtaaacaaaaagcgcgaaaagtaaataaagatatataacgcattaaaaaagcagtgaaaccggaaagatcaacatggttttactgctttttacgttgatagaaaaatgaaatacagcactgcaaatggtgacaattaatatagattctgttataatttttttagtaaggggtggaaaaattaattgtccgtttaggcgagggaaatagtgatcatgaaaaaaagcaatgtgtggaaaaaaacagaatgggcagggttgatctgtatattttttatcctgatgattttgatacgtatgttatggaattcagggtcagatggagaaatggcagatatccgctctgtcaacagtggctggtatcagatggtagatggaaaagaaaaagcccttgaacttcctgctatggttaaggcagatcaggatggaaagatcatactttataataatacactgaacccggaagataaaaataaggtcctgtcaataaacggccttcaggaacagccggaagtgtggatgggaaaaaagtgtctgttccggtatgaagaaaaggattttctaaagaatgaccagatgaggggaaaaatgtgggcagatgtgtggctgacagaagatacaggaacagagccgttctgccttatttatgaaagtaataacagagcctccctttatatacaggcacctgttttaggaagctttccggcagttacacagaagcatttccaggaatctgtattttcatttcttatgatccttggaatgtggggaacgggaattgtttctgctattgttttctggtatatgaaagcccatcatattattgaaaagcgttttctggatgcatcattgtttatgttcatctgtggtctgtggtgttatctggactcaggtttttatcagatgtacggaaatcatggtgctgttggaatggttctttctttttatgcatttattcttatgtcagttccaatgctctggtttgtacagaatacaataagcgagaaagtacggtgggtcccgcaggtgtggatattccttctttatggaaatgccattttgcaaggaatactcaatatcctgtttcatatcccatttgtgcatatgctgtttttaacacacattatgctgttttccggggttatatccatgatctgtcttctgtggaaagaatacaaaagaagtgaagcggaagaacttctgttttgtctgcgggcatttgccacattgggagtcagcggtgtgacagcacttatcctgtactgggtatattcgatctactggtatgatatggtctttcaggcaggaatctttttatacacatcgatcctgttctggcatttactgcaaaaaacatccagggacagtcagttcaggatggagcagctggtctatgaaaaaatgtcaatggaagacaggatgactggattaaaaaacaggaaagcatttgaaaaatacataaaagagatccaggaaggaaagctccggcttgagaacgcgatgcttttatttatagagataacaggactgaaacagatcaacgatatttacggaatgaaaacaggagatgaagcagtgatccagacagcccggtgtatccaaaaggcagcagatagtgaccagaggcataagatagaaagtttccgcattggcggtacggagtttgctgtgatcgtaatggatccccagatacagccgcaggagctggaatgcctccttgaaaatgaagtgaaaaaggaaacggaaaacaggtattatatttctttacaattcggatatggttatctgaaaaatgaggacgggatgcgaaatacagtaagtgactggaaacgtcaggcagatcacatgttgcaaagaacaaagggggctatttatgatgatgtataatgcagattttctgatcgcagcagtggtcatattgctgttggttttgagaaatttcctggatcagaaaagggcagaggatttaaatagcagggtatttcttttctttgcagttattgggatcctggatgtgatcgctgaattagtaagcaattattatataacttcaggagatggggactttggcctggctgcagtggtgaccacaactattttttatctgtttcaggcattgcttccatatacacttctttgttatattatgacattgcacgataataagcttatttcagtgaagaagatgctgctggctggtattgcaactattttactggtcagtattgtgcttaccaatccctttactgaaaaattgttttattttgatatatcagccggatatgtggaaggaccatggtacagactgatgtattacagtgcccttttccatctggcagtgattttgatccttgttatctcctggaaaaaagaatttggccctcagaaaataaaggtgatcctggatatcctgatcctgtgcggatgtggggtagtgatccagcttttgtattaccctctgctgatgacaggttttggcatgagtcttggaatactggctctgtttcttactatcaataatccaaatgcgaaccgggacagccttacaggagtatataatcacctttaccttaccagaaggagcgatgaactgatcgcagcaggaaaatccttccatataatcacaatatacctttaccagctaaagcatatcaataaagttgccggagttgaaggcggtgattatattctgcagcttacagcaaaaaaactggaagaactgtgtggaagccgggttttccgtattacgggaaaacgttttttagttctgactatgtcattgcaggagtatgagtattatattacacagataaagaagatgtttgaaaccgatatgcagatggatgcagacagcagtaaacctgcaacgcctgtgatcctcagtgggatcgtccatggacaaaaacttggtgccagcgggctgatgctggaatatgcagagtatctggaatcattgtctatgcaaaatggcatgatagaggtgatacaggatgatcagcagaccatggatggctttttatataataaaaaagtagagcagtatctgcacacggctattgcccaggatctttttgaagtatattatcagccggtttattctacagagaaaaatgattttgttacactggaagcattaagccgtctgcatcatccggagttaggctggatcgcaccggatgtctttatacagatcgcagaaaaaaatcatatgatcgaacagatcacagatctgcagtttaaacgcatctgcatgtttataaatgaacaccggggtctgatgaagaagctttttaatataaaagtaaatttgtcttccctggatctgatgcgcagtgactgcagcagccattttatccgtatgatggatgatatggatatccaccatgactggatacagtttgagatcacagaaacggttgctacagaatacaacgcaggattaggaatggtagtagatgggtttatggctgccggggtcagactgtgtctggacgattttggttccggatatgcaaacctgaatacagtcatgagactgccattttctgctatcaagatagacagaacacttctttttgatatttgtaatgataaaaaacgtgccatgttctatcagagcattattgaaaccttccaccggatgggttacagcatagtttcagaaggagtagaaacagaagaggaaatgagtctgttaagcagctggggtgtggatatgatccagggatattatttttccagacctcttccggtggaggaactgcttaaactgctgagcatgtgatgctgttccttttctgcatacatacgctggtctgcaaggatacggatctcattagcagtagatgcatccctgggataggcggcgtatccgcagctggaaccaacatacagggtttttccgtcaatatcaaaaggagcgcagagccggttttgtatctgttccttgatcctgcagcagagactttcatcaaattcagtacacactaccaggctgaattcatcaccgccaatgcggaaggcatagtcattgctgcggatacaggactgaaggcgtttggcagcttcttttaaaagcttatcacccatgtcatgaccataggtgtcattaacaggtttaaaatggtccagatccagatagaaaagtatgaaagggagcttttgaagctcctttttatgcagtatggagttaaaataacgctcgttaaataaaccagtaaggccgtctgtattggcaaggttctctaaggcatgcttctgtccaatatcctgggtgataagcataaccttctccagttcatgttcaggactccattcaacggggacaacatgcatgatcaggtatgcatcggcggaacggttgtagtattcaattttaaagatatcatccttttttttcaggacgcagcgcagataatctggtgtaaggagatggttcatctttttattttccgtatcagtcatcaccagatactggcgggaaatatcctcaaccagatcatcatagtatccggtttccggatagatggggtgcttcagcaggttttcatgatattcatagcggttgtttttcagatcgcctacagcaaaacggtcaacgatccttccaagtcctgaaaacatctgttcagtaagctctttgcgctttagcaggatcatttgctcatgttctttcatgcgcagcctggaatccatcagggcaaaaacagtacccgtaagaagcagggcgatacatccgttcaggatcaggagcaggacaatggtgatggactgtatacggcgcatactggcatctacaacatcatcatggataatacccacaatggtccagtcattgatcccggtgggttcgtataccagataatagtttttgttgttgtaacggcactggagacttccggtagaaacattcttaatattctttttcaggtcagttatctcagtttctgtcatattcgtatacttgtttaaaaaatcaaagagattagatattttctggagaaattctgttttgggttcaagggaaaggaggacattgccatcggatgtaaggatgtagcagtcactttgtccctgataaatattacctgcgatcagtttttccactacatcattattatagctgacagcaagtccggaataggttatgccatttatggtatatggaacatccatgggaagcgcaaatacgatccggcggttggaatcgcttgcaatatagctggaaataacaggctggccggttttatacatatccagaaagatcccctgtatatttggggcatttccgtcccgtcctgcagcagttataaaatcacagttctcattaaacatataaaaatcctgatattgccaggcatccttgcgtctggcaaagtcataccagagagttttcatattttcagcatcatccaggtattgcaaattattgctccagtcagaaagcgcattccagttgtgctggacaaacatagtaaaggttttgtctacctgctcataagtagacagcagatgctgggaattttcctcatagatactttttttgataaaattgttgtaaaaaataatcccgaaaagaaaaagaaatgccaaaacagttccggccagtataagcagtttgggtgttttcttcataaatacgggaacctccttcaatgttggtgcttttcttgttggttttcaggtttcctactcatgtttttgggcttgatatctgaatataagtatatcatattctgggagtttctggaatttttttcgattgtggaaaaagagtgacagcggttttacgcagaaaaaaacagagctgcttttatacagctctgctaaaaactggttttgttacttcgcctcagcaatcgcctgttccatttcagaagcagagataacgccaatggtcttattggcaatcacacctcttctgaaatagagaagagttggtacgctcattaccttaaaacgggttgcaagatccatgtcttcgtcaatgtcaactttatagaaatgaacttccgggtggagttctgccattttttctacagttggagccagcattttacagggaccgcaccaggtagcaaagaaatcaaccactaccagatcatctccggcatttactgcctggtcaaatgtgtcagatgttaaatgtgtaagtgccatatgaaaaacctcctattgtctgaatgatatgatctgatgtcataacacttatatcataccacaaagtgagagaaaaatatgtaataaaattctcaagtaaaaatttttcctatcagctgcagcaccacttccgccactcctgacaaaagcattacatgaatagggtttattttaaagcgtaccaacaggatcagggagccgatgaaaatacctacggcctggatgctgatatttggcagaagttccgtagttgtcagggaagccatagtttcgccccagaaagcgttgaccaggatgctgacaccggcagctgcgatcatggcgatcacagccggacgcagggatttaaggacgccctggagaaggcttaaatttctgtatttcaggtaaattttagcaagcaaagtgaccaggatacaggatggcagaacgcagcctgcggtggcagccaaagcaccaggcattcctgcaatgcgggtgcctacgaaggtagcggaattgaccgcaatgggcccaggcgtcatctgggaaatggtgatcaggtccgtaaattctgactgggaaagccatggatggagctggaccacctggttttggatcagaggcatggcagcatagccgcctccgaagctgaaggcaccgatctgaagaaaactgagaaaaagctgtaagtagatcataatgtacctcccttctgtttgttagcctgggaagtattacggtcgtttttttgggcccttttctcccggtacagtgtaagcaccacacctaaagcaatacagatcaggatcaatacaatggcactgactttataaaagtaattagcaataaaagctgcggccataatgaaaatggacaggtactgtttttcttttacaataccggatgccatgctaaagctgacttccataataactgctcctacgcctgactgcatgccatttaacatccacccaacgatcaggttggaacggaatgccgcataacagaatgagatagcagaaagaatgacaaaaggcggtattactgtagcaaccacagagcataagactcctgtcaggccagccagcttgtaacctacaacgatagccccgtttacagcaatggctccgggacatgactgggcgatagccaccagatccagcatttcttcctcatcgatccagtgatactggtctacaaattttgttttcatcaaagtaacgatcacgtatccgccgccaaaggtaaaggcactgagatacaatgttgagagaaagagctttttaaggatctcatctttactggctccttttatatttaattccatattttcctcctgtgtaacagactactatacgtccagatcgtggacgtacaacaacattctttcttactataagccatgaaaatccagatgtaaatgtaaaaatgtatgatgaatgagaaaatgataaggtgatcataaaaattttcttgacagcttgttaagactatgttaatttaaaaagtgtgaccactcaatatattgagttaagcccagacggacaggcgggtcagaagccgaaagtgggaaaccacattattgattgggttaggagcccaaattttataagtcgatacgcagtatgcgtaattttatcagtgcaaaaaggcacgtcacttgtgaaacggtcaataagagcttctggcaaaacagagcagagaactggggagtagggtcactttttttctgtctgttaaaaggacagagacatttaaagacaaaacacatacagcaggtgatggaatatgccgtcacctgttttttttatgtttttttatggataaaagggacggcgagtatgaggaggcggaaaaatggacctggaagcacaaaagcgtgcgcctatttatgaggcgttagagcgttttagaaagaaaagggtagtgccctttgacgtaccgggacacaaaagaggacggggaaacccagagctggcagctcttttaggggaaaaatgtgttggattagatgtaaactccatgaaacctttggataacctgtgccatccggtatctgtgatccgggaggcagaggaacttgcagcagaggcctttggcgccagccatgcatttcttatggtagggggaaccacttctgctgttcaggggatgatcctttcagtctgtaaagcaggagataagatcattctgccaagaaatgtacataaaagtgccatcaatgccctggtactttgcggggcagttccggtttatgtaaatccggaagtaaacggagatctgggcatctctcttggaatggatatccggaaggtggaaaaagccattgaggaaaatccggatgcagtggcagtcctggtaaataatcccacttactacgggatctgttctgacctgcgtgggatcgtaaaactggcccacgaaaaaggcatgaaggtgctggcagacgaagcccatgggactcatttgtactttggaaaaggacttcctgtgaatgcaatggcagcaggtgcagatatggcagctgtttccatgcacaagtcaggaggaagcctgacacaaagctccatgctccttttaaacaagggcatgaaccaggactatgtgcgtcagatcattaacctgacacagaccaccagtgcatcctatcttctcctttccagtctggatatttccagaagaaatctggccctgcgtggggaagagtcctttggaaaagtgatccagatggcagaatatgccagaaatgagatcaattccattggcggctattatgcatatggaaaagatctggtcaatggtaccagtgtctatgattttgatgtgaccaagctttctgtgtatacactggggatcggactggctggcatcgaggtttatgacctgttaagggatgagtatgatatccagatcgaatttggagatatctgcaacattctggcatacatttccattggtgaccgcattcaggatattgagcgccttgtgggagctttggcagatattgagcgcctttacaggaaagataagacgggcatgctcaccggggaatacatttcaccaaaagtagaatgttccccacagaaagctttttatgcccagaaagtttcactccctattgaacagacggcaggaaagatcagcggtgaatttgttatgtgttatccgccgggtatcccgatcctggcgccaggggaagtgatcacccaggagatcgtggagtacattctttatgcaaaggaaaaaggatgttccatgcagggaacagaagacccgaagatcgaacggctgatggttttagtataaattgctcccgctgtgggagaacatcaggaggaagaaaatggaactttggtattcggagtttcatacggaaaatgtaaagctttctgtccgtgtggaccgtcagctgttttccggtgaaagtgagtatcagcggatcgatgtatttgagtctgctgagtttggaaaatttgtagccttggacggggagatcgtcttctccgaaaaagatgaatttatctatgatgaaatggtgacccatgtgcctatggctgtccaccctaatgtgaaaaatgtgctgatcattggcggcggggacggcggtgtggcaaaggagttgatccagtatccgggaattgagtccattgacgtagtagaaacggacaaaatgtttgtagatgtgtgcagggagatctttccggaggtagcctgcggattagacgaagagcgggtccatgtatattatgacgacggactgcgtttccttcgtggaaagaaaggctgttatgacctgatcatcaatgactctacagacccatttggacatacagaaggtctgtttacaaaggagttttacggcagctgctacaatgcgctgcgggaagacgggatcatggtatatcagcatggaagccccttttatgatgaagatgaagctgcctgccgtagcatgcacaggaaagtataccgttctttccctgtaagccgtgtgtatcaggcccatattccaacctgtccgtccggctactggctgttcggctttgcgtcaaagaagtatcatccgttaaatgatcttcaggcggaaaagtggaatgaacttcatatacctacatggtactatacaaccaatctccataccggcgcgttcatgctgccaaaatatgtggaggacctgttagaagaggaggaaaataacaaatgagcagattaatggtgatcggatgtggaggcgtagcttccgtagcagtacataagtgctgccagaacagcggtgtatttacagaacttatgatcgcaagccgcacaaaatcaaagtgtgatgccttaaaggcacagttagaaggaaaaacagatacggtgatcacaaccgcccaggtggatgcagataaggtagaagaacttgaggcactgatccgctcctataagccggatgcagtattaaacgtggctcttccttatcaggaccttactattatggaagcatgccttcgtacaggtgtagactacattgatacagccaattatgaggctgaaaatacagatgatccacagtggagagcaatttacgaaaaacgctgcaaggaaaaaggatttactgcatactttgattattcctggcagtgggatctgaatgaccgttttaaagaggctggtcttaccgccctgttaggaagcggttttgatccgggtgttaccagcgtattttctgcttatgcattaaagcattattttgacgagatccataccattgatattttagactgcaacggcggagatcatggctatccatttgctaccaactttaacccggagatcaatttacgcgaagtatctgcaaacggctcctactgggagaatggtcactgggtagaaacagagccaatggagatcaagagagaatatgatttccctgaagtaggaaagaaagatatgtatcttcttcatcacgaagagatcgagtctcttgcaaaaaatatcccgggagttaagcggatccgcttctttatgacctttggacagagctacttaacccatatgaaatgcctggaaaatgtaggaatgctttccacttccccgatccagttccagggacaggagatcgtaccgatccagtttttaaaggcactgcttcctgatcctgcttccttaggtccaagaactgtaggaaagactaatatcggctgtatctttaatggtgtaaaagacggaaaagaaaagaccatttacatttacaatgtatgcgaccaccaggagtgctacaaagaggttggttcccaggcaatttcctatacaaccggtgttccggctatgatcggcgctatgatggtagttaccggtgcatggaaaaaagacggcgtgtttaacgtagaggaatttgatccggatccatttatggacgccttaaataagtggggacttccatggcaggtatgcgaagatcctcagatcgtagaatagggagaacttgaaaatgagaatggatcagcttcccactccctgttatgtgatcgatgagaagaaattgaaagaaaatctggagatcttgggggatgtccgggaaaaagcaggctgtaagatcctgctggcccagaaagccttttcctgcttttatgaatatcctctgatcgggcagtatttagacggcaccacagccagcggcctgtatgaggccagacttggaaaagaagaaatggggaaagaaaaccatgtgtttgccccggcttataaggatgcagatataaaagaactgggagagatctgtgaccacattatctttaattcctttgcccagcttcgccgccataaagacgcagtctcaggaaaaagcctgggactgcgcatcaacccggagtgttccactcagggggagcatgccatttatgatccctgtgctcctggttcaagacttggcgttacaaaagaggtatttgactgtgagattgcagcagagccggagctttttgaggctctggacggcctgcattttcatacgctttgcgagcagaatgcagatgatctggcaaaaacactggaagcggtggaagaaaagttcggcccatggctttctaagataaaatggctgaatatgggcggcggtcatcatattacaagagatgattatgacagagagctgcttataaaatgcatccgtcatataagagacacttatggagtggaagtgtatttggagccgggagaagctattgccttaaatgccggttatctggtgacagaggtaatggatattgtggaaaatggactttctgtgctgatccttgacgcttctgctgcctgccatatgccggatgtgctggaaatgccatacagaccgccattaaaggacagcggagtttcaggagaaaaggagtttacctaccgcctttcctcctgcacctgtctggcaggagatgtgatcggggactattcctttgatcacaagatccaggtgggagataagctgtattttcaggatatggctatttattccatggtgaaaaataatacatttaacggtattccccttcctgggatcgctgtgatgaaagaggacggggactgcgagatgatccgcacttttggatatgaagactttaaggggagactggcataatggtgatggtggaaaagacggatatgaccggtgaaatggataagataaataaaacggtgcaggcggaacggctaaaaacattgccggcatcagatggatttcacatgccgggagagtttgaacctcacaaaggcaccattatgatctggccggagcgccccggttcctgggcttatggagccagagatgccagaaaagcttttgcacagatcgcagaggccatagcagaaggagaagatgttttcatgcttgctggtccttcttccatcgagtctgcgaaagcggctttttctggaaagtcagaaaacatccacattcttcctatagaaacagacgatgcctgggccagagatgtaggacctacctttgtaaaaaatgcccggaaggaagtccggggcatcagctggcagttcaatgcctggggcggtgaggtagacggcctttatgcaagctgggaaaaggatgatgctgcggcagaggcggtctgcgatgctcttggttatcctgtatatgatgcaggagattttgtcctggaaggcggttccattcacagtgacggagaaggaacgctgttagtaacagaagcatgtcttttaagtcctggaagaaacccacgccttacaaaagaagagattgaaaagaagctttgtgaatatctgggtgcaaaaaaggtgatctggctgaaaaacggcatctggcaggacgagaccaatgagcatgtggacaatgtgtgcgcctttgtaaagccgggagaggtagttttagcctggaccgatgataaagaagatccacagtatgccctttccatggaagattaccagattttggaaaatgagacagatgcaaagggcagaaagtttgtgatccataaactgccaattcctgaaaagccggtatgcatccaggaagaagacttaaaaggtcttgcttttgagccgggagaagataccagagaagcaggagaacggctggcagccagttatgtaaatttctatattgcaaatgaagcagttttagttcctcagtttcaggataagcatgataagctggcctgcgatattttaggaaagctgttcccggagcggaagatctgcccgattgatgcacaggccatcatcataggtggcggaaatatccattgtattacccagcagatcccttcaggctgtggaaagtaaaattcggcaaccagcagtaaccgcaaaagttgccaacgaaaataaaaatggatgaaacattataaaatgttggaaaaacaacggatcaaatggatttgggaatatcgggtccagtgaaagaaggagaaacgaaaattgagaaacgtaagatgtgccgcagtccagatgcgctgcagcagaaatgtagcagaaaacatagaaaaagcagaggctctggtacgtcaggcagcagcggaaggagctcaggtgatccttcttccagagctgtttgaacgtcagtatttctgccaggagcgcagatatgattattaccagtttgcaacgcctgtaatggaaaatccggcagtgagatatttccagagagtctgtgcaagccttggagtagtgatcccggtaagcttttatgaaagagatgtaaaccggctgtttaattctgttgctatgatcgatgcagacggttctattctgggcgtttacagaaagacccatatcccggatgaccatttctatcaggaaaaattttatttcacaccgggagataccggttttaaggtatttgacacagcctatggaaaagtgggcgttgggatctgctgggaccagtggtttccggagactgccagagctatggcagtagaaggcgcagagatccttctgtatccaacagctattggaagtgaacctattctttccactgacagtatgcctcactggagaagatgtatgcagggacacagcgcatctaatctggtgcctgtggttgcagcgaaccgggtaggcgaggaacgggtagagccatgtgcagaaaatgcaggacagagttcttcccttgttttctacggttcatcttttatcaccgacggctgtggagagatccagatatccatgggaagacaggaagaaggttttatagcagctacctttgatctggaccagctgatggaagaccgcctttcctggggacttttcagggacagacggccggagatgtatggaaagcttctgtaaaaagatcacagataacactatgaaaaatagtagtgacttataaattgactaatatcttccagaacagtagcagatccgataagataagtactgtcaataagcaatgcagacatgcaaaagcaacgaatggaggtatattcaatgttaaatgagtcagtgatcaaagttttaaaaaatagtatgtgggatcttgctacctgcgcaaatggagagccaaacgtagttccagttgcatttaaggatgtaacagaggacggaaagctggttgtaggtgatgttttccttgaaacaactttaaacaacattaaggcaaatgacggaaaaattgctatttctgtatatgacacacagagcctggaaggatatcagatcaagggaactgctgagtacgtaacagagggcgatgttgtagatacctttaaggctatggtagagagcatgtttaagggtgctgcaactgcaaagggagcgcttatcatcacacctgccaaagtgatcgttaccacacctggtgctgacaacaagaaagaaatctaaagcactgtaaacatattataaagctttaacaaacgtatatcttcccgggagactttaaggccctgcaacagagcttcgtcttccgggagttttgtttttgaaaacagcattttagtagcgatgggcatcatgggacggctggaaaaaccattaaacagtccccattttgtatctgtatccagataggaagcaaggatctgtgcgctggctttttctaccgggctgtcctggttggtcagctggatattggtcagggcgtcaaaatgctcaatatagccccagtatgtattttcacacagcttgtaattttcaaaatctttaaaattcatatacatcatgatcttataacttgatgtatcagtttctgaaagcacatcaaagacgcagcggatcagctgcttatttcttccgtcatatacataggcataaaactgggagcagcctgcgaaaaaggcgggactgtttttgctgtccggcaggttggcatggcgtggcggacagtagagcagctgctctacgtggatctgcaaagcagaggcaatttcatataatgtttcaatatctaccggaatctccccgttttcatacttggaaacagtagatttgcttttgcagataacagccgcaagggcttccagtgtcattttgcgttttttgcggaaagtgcggatctgttttccgatttctgtactgatctgggacatagattaagccactccttttatagattaaagtaaggatccaactgtatttttaatgactttatgatagcaaaaagtttcgtataaatcaacaaaaccgcgatttttttctgcagtttttcaggcggggccaaaagcaggtgttggaaagaaaaaaatccagtttcaggaaacaagttttagatttttccattaagaggaaacaaatgcctttttgcttcagcgtattttttttagtacaatgcagatatgagatgcatccaggaaatcagttaaatgacaggtttgcgcagcctgacaaacaaaagcaggaggaaatgaatggaatccagtaagataaaagaactggcacaggaccagcaggactacgtagtggctatgaggcgggaatttcaccgttcaccggagctttcaggaaaagaattccacacaagagaacggttgatagaagaaatcgaaaaaatgggtgttccctatgaaaagcttccaggaacaggccttattgcgatcattgaaggcggaaagcctgggaagaataaaatactgcgtgcagatatagatgctctgccattacaggaagaaactgaaaatttaaagcagcctaaggtctgcgtttctgaaattccaggcagatgtcatgcctgcggccatgatgcccatatggcaatgctccttggaacaatgagaatactggtgcagaacaaagaagaacttccaggaactgtatattgttgttttgaagaaggagaggaaacaaactgcggaattgataccatgatagaggcactggaaaaatatcctattgatgagtgctttgcatttcacgtatataacgaactggatgcaggcaaggtcaacattgttccgggaccaagaatggcaggaacagtaggaattggtttccacctaaaaggaaagagcggacatggctccagaccggatcaggcgatcaacccgatcattccggcagcccatattatcacacagctgaattctgcttttatgaaccagttaaatgtagaagaaacagttacacttggtcttggaatggtaaaagctggagaagctaccaacattatcccggatgatgcttatgtaggaggaactgcccgtttcttcaataaagaagaaggagaaaaggcattagagatcattgagcggatcgcaagaaatacagcagattcctacagatgcggcattgaatttgaaaagagaaataatatcagcccatatcctgttgtaaatgatgagaaaacagctcttaagatccagaaagcagtaggtgagatctgtggagaagaagtattaggagactgtgataagtggtttgcttctgagtgctacagtgcatatcagaacaaatatccaggcgtgctgggatttttagggatccgcaatgaagcttatggcagcggtgcagcacaccataatggaaaattcgatatagatgaatcaggattctggctgggagtgtgtgcagaagcagcctttgcatttgaaaaataaaaacagggaatggtttgaaaaatacgtaagagtataaaggggaaaaactaaatgggaaaaaaagaaaagaaaccgtttaaaatgccgcatcttttgtggattatgtttgggatcatagtattggcctgtctggcaacctatctgatcccggccggagagtttgcagtaaatgaagcaggacagatcacaggtactgatttccacttcctgggacatcagacaccggtcagtccgtggggcgcactgatgcgtgtgaagtcaggcatggtaggagcagcaaccatagcgtttgttgttatgatatcaggagctaatatcaacgttgtactggaaacaggcgttatgaacgatctgatgaattggggtgtttataagttaaaggataaaggaacaggtatcctggtatccatgatgatgatccttatggcttatttaggtggatttggtggaacagatgccctgatcgctgtagtaccggttggtgttatgttctctaaaaagctgaagctggatccaatctgtgcccttgcagtaaccacctttgcagcattagtgggctttggtacaggtcctgcgcagcaggcaactacacagatgcttatgggcgtcactccttattctggtttctttaccaggctggtcatcatgaatttctttttatttgttgcgatcattatgactatgcagtatatcaaaaagatccgcaaagatcctgctgcatctataatgtatcaggatggctggagaccggatgctattgtgaacggttcagaggaagaactgttaaagcatgtggaaatgaactggagaaaagtagcagttattgttctttttgtacttcagtatctgatcattgccatttatcctcttatgggcggagacagtaacctgacctttgactttatgcttgcagttatgatcattactatgatcgtagtaggcattatcggcggcatgtctgctgaaaagctggctgatgcttttgcaaaaggccttggctctatggcttttgtagcttttgttatcggacttgcaaaggtgatctctctggtgctggcagatggaaatgtgatccataccattgtgtatgttcttaccaagccgcttatgagtcttccaaaatccgtatccagtgtaggacttacactgatcgtttctgttatcaacccgctgatcccgtctgctacttcaaaggctgcgatcctggttcctattatgaagccggtagcagaagcactgggcttacatctgaaccttgcagttgtagcttatcagatgggcgacagctttaccaacctgttatccccgcttttaggctggatgatcgggtcctgcattatggcggaagtgccatttccaagatggtttaaatgggtgttcccaaaggttatcacccttattttactggcatgtgtgatcgttttcctgctgactgttaccggatggaccggcgtaatatagttatacagtgatataaatgagagatgagcctgcattgaaaaggctttatctctcattttttgtttgtgtatgtggtgaagggatctgtgacatattcaccggtcaaaagccctgaaaagtttcgtataaatcaataaatcaacgatttcttttctggtttacctgctttttctaaagtctctgcacagaaaaaagaaaaatctattttcaggaaacttaatttgtaaaattccactgtagagaaacttaaagcactttgatttcgggtacttattttagtacaatccaggcatgagatgcatccagtacctgaaataaaaataacagaccaggccggcgcaagcctggaaaatcagagaaacggggtaaaaaatatgtacaattttgatgagatcattgacagacggcatacaaatgccatgaacacagacggtttccgtgattatattttccatgcagatgagactatgaaattcccatacaaggatgaagaatttatccgtatgtgggtagcagatatggaatttgccacaccggatgttgttattgacggaatgagagagcgtttagacaagcgtatcttcggctataccagagtatttgaaaagagctattacgaagcattttccgcatggtgccagagaagatatggctggacctttgacagaaaagaactggtaatgtcaaatggtatcattccagcgttatatgaaatggtggaatacatctgcaaaccagatgaaaaggtattattcttaactccttcttatgcatatttcaagtatgcagcagactttagcaagagaggctatgtatgcagtgaccttcatgatgaagacggatattataccattgattttgatgatcttgccaagaaggcagcagacgagaagactacactgtttatcctgtgcaatcctcataacccaagtggacgtatctggactgaagaagaattaaagaagatggcagagatcattgaaaagaacaatatgtgggtcatctctgatgagatccactgtgatttgatccgctgcgataaaaagcatatcccaatgggcaaggtaatgccggattacaagcgcctgatcacctgcatggcaccaagcaagacctttaacctggcaggtatgatgatctccaacgtgatcatccgtgatgaaggcttaaaagaaatctggttaggccgtcattataactttgacaacccgttaagtattgcagcagcacaggcagcttatgaaaagggcgagccatggctggaagaattaagggcatatctggatgagaacttccgcttcaccggagaatacttaaaggagcatctgccaaaggcaaaatacagagtatctgaagcaacctatcttgcgtgggtagacttaaatgcctactttgagccagatgagcacctgcctctgttcttcgcatacaaggccggagtccttctggaaggaggcaacatgttcgtacagaactctgatggattcatccgtctgaacctggcttgcccgaaggcaactttggcagaaggtttaagaagaatctgcgaagcagttaatacaaaacatacagaaaagtatctgggagagaaataaatattttaaattcggggattaaatatgaaacttattttaataggaagccatttatgccaggacacattatatgcactgaataaattaaaagattataaagtggaaattgattttcaggatatttccagcagctttccggcattgaagctgtttttaaataaaagagagcatgatcagaaatatgtgccggtaaaggaaaatggaggaatcgggatcccatttatgatctttgaggacggaacggaaacattttccttagatgaggcactgaaaaaagtatcagagcattaatacctaaaattctaagacaagaatagaggaagcggcatatgaataagcaggaatttttagaaacatatattgcagaccgtcacaatacaaattgcagtaaatgggatgggttaaaagaaaaatttggcgaagctgacctgctgcctatgtgggtggcagatatggaatttaagacctgtgagggatcacagatgctttagttgaacgtgcaaaacaggggattttcggatacggcgtggttcccgatgaatattatgaactgttttcaaaatggatggaaagacatcatggttttgcagtgaaaaaagaatgggtacgtttttgcaccggctgcgtaacagctatcgcgtggatgatccatgcatatacacagcctggagatgcgtgtctgatcctgacaccggtatattatccattccacaatgtagtgaccaacaatgaccgtaagcttgtaaccgcagacttaaaatatgaaaatggctatttctccatggattatgacgcaattgagcaggcgatcacagaaaatgatgtgaaactgttccttatgtgttccccacataatccggcaggaagagtatggacagaggaagaactggaccatgtgcttgctatctgcaaaaagtacaatgttctggtggttgcagatgagatccaccaggatattgtattcggagaaaataaattcgtgccagcagcttctgtggcagaaggaaaataccaggatattttactgactttaaatttatcctcaaaaacatttaacctggcgactctgatccattcccatattgtgatcataaatgataagcttcgtgaaatttatgataagtttgccaacggtttaaaccgtacagaagtaagcgttatgggtatggttgccactatggctggttataagacaggtgatgaatggttatccaatgtattggaagggatcggcgacaactataaatatctgaaagaaacactggaaacagagcttccgggagttgtggtatgctccatggaaggaacctatcttccaatgatcgacttaagagcctgggtaaaaccggaagaaacccatgattttatccaggggaaatgccgtctggcagtagattatggtgaatggtttggagccggatatgaaggatttatccgtatgaacctggcaacagatcctgtttttgtaaagcaggcagctgaaacgatcatcagagaagctaagaaatataaaaaatagattgttcgtgattgaaatgactcatgggaacgataaagcttggcttaaaaggcttagttcccatgagttttttatattaatcttaactataaaagtttcatataaatcaacaaagcggcgattttgtatttgattttatatagtctttccaaaaagttcttacgaaaaaagaaaagtttatttctaagaaacttaaaagggcatttttatagcatgaagaaacttttgatttttgcgttaaagtactacttttagtacaattaaccttaagaggtgcatccatatatacagtcattcagatttgcgcagatctgagtgaagtaagtccttggtatctgatcagtctgtaaaggcatcagagaagaggctgggtattaaagtagcattaaaataccaaacataaaaaatatgtctgggagggacagcatatggacaaaacagaacaaatactacaagctgcgaaagaaggggcaaaaaaatattttgatgagcaggtgagtctgcttacaaagttttcttcgattgactgtggtacaggtgatgaagaaggaaataaaaaaatagtagcaatcgttgagaatttgttaaataccattcaggggatccagattgagaaacattacagtaaaggatttggtcagcatattgtagcaaagctgaaaccggaaaatcctgatggcaagattattctcagtgcgcatatggatactgtatttaaaaaaggcgatacagctgagaatccaccgcatattgaaggagacagattttacggtttaggaagtgcagactgtaaaggtggattactggtttctatttatggagtgaagatattacaggaaaatgggttgcttccaaataaggaaatcgtatttatctttaactgtgatgaagaatcaggaactcctgttgcacatccagtatttgaccttgaaattcctggtacagacatggcctttgtatttgaaccgtcaagactggataatggagttgttacatccagaaagggaaccatacggttaccaatcgaagtccatggcgtgaaagcacattcaggaaataattatctggatggaagaagcgcaaccatagaactggcaagtaagctgttgaaattctatgaaagcaatgaaaatgaccggggaatccagtttaatgcagttgaattaaaaggcggggaaaatggagtaggagtcatcccagattatgcttctgcaacagtaggtgtgagggtgttaagccgtgcagatattgagcatgtgaaagaaatagcagcccgtattgaaaaagaatcttatattccagatacaactactaagattggcttcagaatggtatgcgtcccaatggagcgtacagaagaaaatgtaaagctttacgaacatgtaaaggcagctggaaaacttttagatcatgaacttccggaacagacagtaggaggaagcggagatgcaagctatttcagctatcagggggttccttctgtagatggtttaggcccgtatatgtataagatccattcaaaggatgaatccatgaggctgtcatctatggtagaaaaaacagaattatttacggtggttcttgccacagttaagtaaatacggaggagaaaggtaatgggaaaaacaaagaaaaaaaattcaggtaccgcagattttggtactgatcatgctgcttattttagtattctgtgcattaagctatattgtcccaggtggagagttccagttagatgataataaacgtgccattgcaggtacattccagtttgttggccagaatcctgtatcaccatggcaggcacttctttctattaagaagggaattgtaggatcagctagtacgatctctttgctgctgatctgtggtggatccctggcagttgtcatttctacaggctgttttgaggaaatgatcaattatggaatctacagactggaagataagagtgttatagtactggtacctgccattgtaacactgatgtcccttttaggcgcatttgcaggaaatgactccatgatcgcatttgttactgttggcttggtcatctgctcaagactgaaactggacagaatttgtgctatgtcaatgttttatttaggatacctgattggtcagggagcttcttttacatctactttgctgatcacagtacagtctatctgtgaagttacaccgttatcaggtatgcaggtgcgtattatcatctggatcatctttacagctgtacatgctgcttactgcacacattatgcattaaagatcacaaagaatccgttaagaagcattaccggtgtacttacaaaaccggaggaacagggagaaaagaaagaaataaaattcccgatccgtgcatttgttaatatgatcactttattctcctgttatattatctacgcatttggttcaaaaaactatggctgggaaaatgattatcttgtagcattaatggtagtggatgttttatttacagctgttatttatcaggtcaatccaaatgaagtaggaaagagattctttaaaggtgcccagggaatgggcggtatctgcgttgttttgggatttgccaaagttattggtacaattttaacagacagcaagatggttaataccatcgctcatggagcatctaccttatttggtggatttggacctatggttgctgcacttgcaatttttgcatttatcttattcttcaatatgctgatcccaagtggatattccaaagctgcgatcctgcttccgttagtatgcccggtaggagatattcttggtgttacgagagagatcattgctcagatttattgcatcggcgacagcttaactaatactttgacacctgtatccagtccattagtaggtgctttaggaattgcagaagttgaatataccgactggttaaaatatgcagtgcctttaataggaatcctgatcggaatcgcatgtgttattatctgtattttatctggtattggctgggtaggttaaaaaggagttttcgttatgtcacatttatattttccaacagaaatattggaatgcttctgtatcgattcttttaaaaattttggattttcagaagatgaaagcaagatcataacagatgtcctgcttacatctgataagttcggaattgaatctcacgggatgcagcgcatttcccgatatcataaaggaatacagaaaggcctgatcaaagtagatgcagtcccggaagttatatttgaaacaccagttacagcagtgcttgatgctcatgatggaatgggacagctggttgcatataaagcaatgaacatggctattgaaaaggctaaaaaaagtggtattgcaattgtaagcgtgcgtaattcaaatcattatggaattgcaggatattatgcaaaaatggcaagtgatgaaggacttatgggaatgtcctgtaccaattcagaggcgatcatggttcctacatttgggaaaaaggcaatgttaggaagcaatcctatagctgtggcaatgccagcagatccatacccgtttttatttgatgcatctacatcagtagtaacccgcggaaaactggaaatgtacaataaagcagaaaaggagcttccggctggttgggcgcttgatgcccagggcaaaccaagcaagaatgctggagaggttctgggaaatatagtaggaaaacgaggcggaggaattgtaccgcttggaggaaacgaagaattaacaggcagtcataaaggatatggatatggaatgctctgtgaattattttcatctattttatctatgggtatgacatccaatcatactcatgtagatggaaaaggcggtacctgccatggatttgcagctgtaaatctggaatttttcggaaatgcagaagagattaagaagcatttatctgtatttttggatgaattgagaaattcaccaaaagcagatggaaaagaaaaaatctatacccacggtgaaaaagaagttcttgcaatagaaaaaataaaagaacagggaattgctgttgatgtaaagactgtttatgaaatgaaacagatgagtgattacctggggatggattttgaaaaatattttggaaaaatagagttagacaaagagtatcacaatttttattaaaatatcattatcacagtaacatctgcaaaggagtacaaattatggaaaagaaaaatctggactgggaaaatatcggttttgcatatcatcagacggatatgcgctatgtggcaaattacaaaaatggcgcctgggatgaaggaggactgactgcagatgccaatgtggtgatcaatgagtgcgcaggtatccttcagtactgccaggaggtttttgaaggactgaaagtatatgagacaaaggatggaagcatcgttgctttcagaccggatcagaatgcagagagaatgatgaattctgccaagggcatggaaatgcccccatttccaaaagaacgtttcctggatgccctggatcaggtggtaaaggcaaatgcagcctgggtaccgccttacggaagcggagcttctctttacatcagaccatatatgtttgcttctacacctgtgatcggagtaaaaccggcagaaggatatcagttccgtattctgtgtacacctgtaggcccatattttaagggcggtgtccgttctcttcacatctgtgtcagtgactatgaccgtgcagcacctcatggaaccggacatatcaaagcaggcctgaactatgcgatgagccttcatgcctacgtagatgcacataaaaacggctatgatgaaaatatgttccttgatccggctaccagaacctttgtagaggagaccggcggagctaatttcttctttgtaacagaagacggagagctggtgatcccgaagtccgactccattttaccgtctatcacccgtcgttctgtgatcacagtagctggtatgctgggaattaaagtaacagaacgtcctgtaaaactggaagaaattggaaaatttgtagaaagcggactgtgcggaactgcagcagtcatctctccagtaggcaagatcacagatcatggaaaagagatcgtattcagggactcagaacataccatgggacctgttacaaagcggctttatgatatattaacaggtatgcagcactgcgagatcgaagcaccggaaggctggatccataagatcatgtaaaaatcaatctatcattcatagttataaattgctggaaaatggctgtctgctgatttgtggacagccatttttctgtaaatagtgatggttagaatatttgtaaaaatcaacacttcatggtatcattagttatagtagttatagaaaaattttgcgtacacataaaatggaaaggagaaaatttaagtaataaataaaattgacattggtgattaaaagtgtttaaatatacccatggaggtattgttatgaacacatcaaatatcactaattacaaaccaaaggattttgctgaattattaggtgtctctgtgaaaacattacagcgttgggacagggaaggaacgctgaaagcaaatcggactccaacggataggcgttattatacttacgaccaatatcttcaattcaaaggtataaatacagagaatgatgatcgacaagttgttatttatgcaagagtttctacaagagatcaaaaggatgatctacaggatcaagtatcatttttacgtcaattctgtaatgccagaggaatgattgtagaccaatgtattgaagattatggaagtggtttaaactataatcgcaaaaagtggaatcagttattagatgaagtaatggaccaaaaaattaaaaccatcatagttacacataaagacagatttatccgatttggatatgattggtttgaaagattctgtatgaagttcaacacaactatcatgatagtgaacaatgaagaactatcaccgcaagaagaacttgtacaggatattgtatctatactccatgttttttcctgtagattatatggacttcgtaagtataaaaaacaaatagaaaaggatgaggacattgctaaagagcttcaagacggaaataaatccgacagaggaacagaaagttaagatccgtaaaacaataggaacttgtagatatatttacaacttctatctcgctcataacaaagaacttcatgacaatggagaaaagtttatgagtggtaaaagttttagtgtctggctgaacaatgagtatcttccccaaaatccggataagttatggatcaaggaagttagttcaaaatctgtaaagcattcaatcgaaaatggttgtgtcgcatttaccagatttttcaaacatcaaagcgcttttcctaattttaaaaagaaaggaagatcagatgtgaagatgtatttcgtaaagaataatccaaaggattgccgatgcgaaagacacaggatcaatattccatcacttggttgggtccgtatgaaagaaaaaggatactttcctactaccaaagacgggtatgtgatcaaaagcggtcatgtttcaataaaagctgacagatactatgtttcagttcttatagagatcccaaataacaagatagccaataattccaataaaggaattggaattgaccttgggctaaaagattttgccatcgtttcaaatggaaagacctacaagaacatcaacagatcaacaagaataaagaaacttgaaaaacagctgatccgggaacagagaagtctttcccgaaagtatgaaaatttaaagaaaggagagtccactcaaagagcaaatatacagaaacaaaagtttaaggtacaaaaacttcatcataaaatggataatatccgtacagattacatgaacaagacaatcgctgagatagtgaaaacaaaaccatcttacatagcgattgaagacttaaatgtaaaaggaatgatgaaaaacaggtgtctttcaaaagctgttgcatctcagaagttttatgaatttagagcaaggctaaaagccaagtgtgatgaaaacggcattgaattaagaatagtggatagattttatccatcttcaaagacttgccatcattgtggttctgtcaaaaaaaatttaaagctttcagatagaatttatcgatgtgaatgtggctatgttgcagatagggatttcaatgcagcactaaatttgaaagatgctaaaacttacaagattgcataattaaaagcaaatgtaagtatgtaccgaaggctatttcgggaattaacgactgtggagtgtacaagaacctgtgagtagcgtattacttgtaatcgccaaagcatacacaatgaagcagtaagaagtattcgtgagaacttcaatttctcgatgtgtttggatatatttaaacacattttgagtggcagctggatctatggcaaagttaaatattccagtaggagtttcggattttgcagaacttcgcagcaatggatattactatgtagataaatcgggtctgatccgtgaaatgttgacttcatcggcagctaaagtgacgcttatcacgcgaccaagacggtttggaaaaacccttggtatgagtatgctggaaaatttttttaatattcggaaaaacagtgaaaaactatttgagaatctggaaatttcaggaaacagagaattgtgtgatcaatggatgaatcagtggccagttatatttttttctttaaaggatatagatggtctggattttcaaagcgcatatgatcgtctggtggtccagctttctaatctttgtaagatgcatgtatatcttttacagagtgaggcaatcgatccggatgataagaaagtatttctggaattgaaagcaggaacggccagtgaagcacaggtcggtttttctttaaatacattaatgcgtatgatggagtcttattatcggaagccagttattcttttactggatgaatacgatgttccactggcaaaagcaagcagtaacgggtattataaagaaatgctgtctgtgatcaaaggaatgatgagtacagcgttgaaggacaatcaatttttaaaatttgcgattattacgggctgtcttaaaattgccaaggaaagcatttttactggaaccaataatctggtttctgatacgatcacagatacccggttaaatgaatattttggatttattcaaaaagatgtagagcagatcctgagggatgccgggagcatagatcatctggaacgtgtaaaaagctggtatgatggttatcattttgggcggatggatgtatattgtccatgggatgtaatgaattatatcagggatatacagagagattcagatacgaggccaaaaagttattggatgaacacaagtgataatggaattattcgttcctttatcgatattgcaggcagtaatattacaaaaaaactggaaacattattgaatggtgggtatattttacagcgtatagatgagaatctgacttatgattatcttcattcatcagaggacaatctgtggagcatcctttatcttaccggttatcttaccagtatacgggaaaatgaattgaaagagaaacttccagatgggatttctgcacttatgataccaaatgcagaaatacgggaaatatttgaaacaacagtgatccaatggtttgatgacagcgcaaaagcatgggacaggaaaaaaatgttttcggcagtgtggaagggtgacagcaggacagtaatggaagaaatgaaccggcttttgcgaaaaaccatcagctatcatgattacagggaagacttttatcatgcttttcttgcaggtatttttgcaggggcgggttatgtggtagaatccaataaagaacatggagaaggccgcagtgatgtggtggtttatgatcctgaggaaggccgtgtggctatttttgaggctaaatattcaaaaacgctggaaactatggatacagactgtcaaaaagcattagatcagatcaatgaaaaaatgtatgcaaaagaatatgaagatgattttgatcacattttgtgctatggtgtttccttttttaagaaacgctgctgtataaaactgaaagatgctaaagtttgaaaaaagagtacattaaattagcaaaggggaaaaatcaaatatgatccgtttacacaatgattataaccgtggtgcatgcgaaaagatattagagaaactggcacagatcaatggggaaagctatgatggatatggggaagatacatggtgtgagaaggcggctaagctgatccgggaaaaatgtaaggcaccggaagctgctatccactttttaccgggagctacacaggctaacttcattgtccacgcggcagctttaagccctatccagagtgtgatctgtccggacagcggtcatgtatatgcacatgaagctggttccattgaaaataccggacacaagctggtgcctcttccttcaacagacggaaagatcagcgcagagcagatccgggaagtggcagcttcttattacaatagcggtgagcctaattatatctgcgaacctaagatggtatacatttcatttcctacagaatggggaaccatttattcagagcaggaattaagagagatccgcaaagtctgcgatgagtacgaaatgtacctgtttgcagacggagccagactgggctatggccttggttctgtgaaaaatgacctgacactggaaaaaatggcagaactgacggatgtattttacattggagggaccaagtgcggcgctttatttggcgaggcactggtgatcacaaacaagaagctggcgcggaagttccgtacttatatgaaacagaacggagccgttctggcaaaaggatggcttcttgggatgcagttttgtgccctgttagaggatgatacttacgaaaaaatgacagcccaggcagatgcctatgctttggagatcaaggctgcatttaaagaaaaagggatccgggaatatgtggacagctataccaaccagttgtttgtgatcctgacagaagaacaggcagaggtactgggaaaagaatatacctttgaacaccagcaggatctggctgatggaagtaaggtagtccgtttctgtaccagctgggccacaaccgaagcagagaaagatcagctgatccgggacatccgggcattataatatttacacccctaaaataagcaatagaaagtaagtaatataaaagatgggaattctgtaaaaagatgattttacagggttcccattttcacgttattattgtattttctcatgtaaaatgtgtctatctgctcagaaatagtatgaaacaaagctattttatgctatactaaaccctaaagtggaaaactatgcgatagagatggagaaacatatgtcaatgaatgaacagggaaaggaaaatgccatcagtgtcagggatgtgactaaggtttaccgcctttatgacaagcccatcgaccggctgaaggaatctgtaagtatttcccataaaaattatcaccgtgacttttatgctttgaaaggactgtctttccaggtaaaaaagggagagaccgtaggtattatcggtacgaatggttctggcaagtctaccattttaaagatcattaccggcgtgcttacacctacttccggtcaggtggatgtagacggaaaaatatcagcccttctggaactgggtgccggtttcaacatggattatacaggaattgaaaatgtatacatgaacggtaccatgatgggatatacgaaaaaagagatggatgcaaagctgcaggatatcctggattttgcagagatcggagatttcgtataccagcctgtaaagacttattccagcggtatgtttgtgcgtctggcttttgcgctggccatcaacgtagatccggagatcctgatcgtagatgaggcgctttctgtaggtgacgtattcttccagtccaaatgttaccggagaatggaagagatccgcaaaaagggcaccaccattctgatggttacccacgatatgggaagtatcatcaagtactgcgataaagttgtactgctgcataagggtgaatttattgcagaaggtccggctggaaaagtggtagatatgtataagaagatactggctggaaagttagatgacctgcgtgcagaactggcggctgaaaaggcagcagaagagggaaaaacagcggaactcccagatggaaaaagcagtgcagaaacgggagacagaaataccgacggtacagaaatgtccgatttttccggcggaatgaatttatcccatacaggccttatgcgtgaccagctggctattaacactgaccgcaccgaatatggagatggaagagcggagatctatgatctgggtcttttagatgccagaggaaatgtgaccaacctgctgttaaagggggaaatgttcaccataaaagagtgcatccgtttccatgcggacatccaggctcctatttttacctataccatcaaagataaaaagggaacagaactgactggaaccaataccatgtttgaaggggcagatatcaagccggtgaagaatggagatgaatataccgtagaatttacccagaaaatgaaccttcagggtggtgagtacctgttaagcatgagctgtaccggctttgaacagggagaacatgtggtgtaccacagactttatgacgtaaccaatattaccgttatttccaataaaaataccgttggcgtttacgatatggaatcacaggtaaaggcggaaaagaggaacgcagatgaatgacataagttatgaaattctggacttatttaagaaatacggcgcagataaagagggcatcttaaaaattttagaggcagacagccgcccggaagtcctttatgccctttcagacatccgtcgcaatcttatggactggatggatttttcaggacaggaacatgtactgcagcttggttctgactatggcgtgatcacaggtctgcttgcagagcgctgcgccagtgttgcagttgtagatgagagagacgaaaatctggtagtgaaccagaagatgaatgaagcacacaccaatatttcctatatgaaagcagctgatttccagaaaatggaagcagttgaaaaagaaggaaaatatgatctgatagttttacgtgcagaccgcccggatatggatattaaggaatgctttacaaggttatcctcatatctttcagaaaacggcaagctgatctttgcatgtgaaaatgcccttggtttaaacttcctttccggtgctgtccatgatgaggatgagactgcatttacaaagggagaactggaagaagctttgaaagaagcaggactttccaaagtggaattttattatcctatgccggaatataagcgggcagtatctgtttattctgaccggtatcttccgggaaagggagatatccctcatgtgacggcagtatatgacagacagcgctgggcctgcatccatgaagacgaaatctccgataaactggtgcaggaaaaggccttcggtctgttttccaatgcatatctggcagtagcatctaagggagcagagagttttaagacagtatttgcaaaatacaacagtaccagaaaagaagaattccagatccggactgcaattctggaagaaaatggaaaacgatatgtggaaaagacgcctcttacagaaaaggcggcagggcatatcagttccatgagtgaaaaatatgagaaattatcaaaggtaaatccaggggtaaaagtgctggcacctgtgtattccgaagataaaaaggcagtccgctttgaatttttaaagggaagaacactggcagagatcttaggagaacagatccggggaaagaaagcaccggtagaagctttaaaagcagcgatcgatcagatatttggacaggcagttcttaaaaatgatccatttgctccaacagacccgtttaaagaggtatttggtgacagtgaagatgttctttccttacaggatacttcctatgaagtcagcaacattgatggcctctttgaaaatctgatggagactgaggacggactttactgtatggattatgaatgggtatttgatttcccaattccatccggttttgtccgctaccgcaatctggtttacttctattataaatatgaaggactgatggagtatgaaaatgcaacccagttcttaaaagagtttggaatggatgagaagctggcagaaacctatgcttctatggaagtagcattccagacctgggtacatggagacggtactcagggataccttggcaattacaagcagcgtctggtgacactggaagaattaaaggcccaggaaaaggaactagctcaggcaagagagcggatcaaccagcttcaggcagaggtagaagagcgcaatatccaggtaaagaaagaccaggagatcctgcgtcttaccaataaccatgtgaccaacctggaagtgatgatcaaagacctgcgccatgaggtgaatgaactgggcaagctggctacctatttaaatggacatgaagcagtgatctttaaaatgcgccggaaactgggagaacaggtaaacaaggcatttccaaagggaaccagaaaacgcaaacttttaaattacagttttaatacagtaaagcatccggttaaatacggaaaaatgtatgccaccaaagagggacgcaacctcatcgaaggtgactttaagatcggagaaggttatcttaccggcggacatctttctttcccgcaatatgagaacccgactgtttctattgtaattccgtgctataaccagatccattatacctatgcctgcttacagtccattctggaatttaccaaagatgtgacgtatgaggttattattgcagatgatgtttctacggatgctactgcagagattagccgttttgtagacggccttgtgatctgccgcaaccagaccaaccagggcttccttcgcaactgcaaccaggctgccaaagctgcaaaaggcaagtatatcatgttcttaaacaatgataccaaggttacagaaggctggctttcttccctggtgaacctgatcgagtcagatgataccattggtatggtcggttccaagctggtttacccggatggaagattacaggaagcaggcggtattatctggagcgatggttccggctggaattacggccgtctggatgatccggataaggcagaatataactatgtaaaagatgtagactatatttcaggtgcagccattttgctgtcagtagatttatggaagcagatcggcggctttgatgaacgttttgctcctgcttactgcgaagactctgacctggcatttgaggtaagaaaggccggttacagagtggtttaccagcccctttccaaagtcattcattttgagggcgtttccaatggtacggatgtaaacggtaccggattaaagcgttatcaggtggaaaacagccagaaattaaaggaaaaatgggcggatgagtttaagaagcagtgcgtcaatgacggaaatccaaacccattccgtgcaagagagcgcagtcagggcaagaaagtcattttagtagtggatcattatgttcctacctttgataaagacgctggttctaagactacttaccagtacctgaaaatgttcttaaagaaaggctatgttgtcaagttcctgggagataacttccttcatgaagagccatattctaccactcttcagcagatgggaattgagatcctttatggggatcactgggctaccggtctttgggactggctgaaattaaataaagatgagatcgacgttgcttatctgaacagacctcatattgctaccaaatatgtagacttcatcaaggaaaataccaatatcaaggtgatctactatggtcatgacctgcacttcttacgtctgggccgtgaatatgagctgaccggggatattaatattaagagagaggctgattactggagggccattgaactttccatgatgcgcaaggcggctatttcctattatccgtcttatgtggagatcaatgccattcatgctattgatccagaaatcaaggcaaaagccattactgcgtatgtatacgatcacttcctgacaaatatccaggaagactttgcaaagagagaaggactgctgtttgtgggcggttttgcccatccgccgaatgcagatgctgtgctctggtttgcaaaggaaatcttcccgtatatcagggagcagctgccggatattaaattctatgtagtcggttccaaggtaacagatgagatcaaagccttagagcagcctggaaacggtatcatcatcaagggctttgtcagtgaagaagagctggcaaacctgtatgcttcctgcaaggtagtggtagttcccctgcgttacggtgcaggtgtaaagggcaaagtggtagaggcaatctataacggcgcaccgatcattaccaccagcaccggtgccgaaggcataccgcaggtagagcaggttcttgaagtagaagatgatccaaagacatttgcagataagacagtagctttgtatcaggataatgaccgctgccgccagatgtgcgaaggaacccagaagtatatcagggaacacttcagcatggatggggcatgggaggtaatagaggaagacttttcgcgatagcaatgagcaatgcgaaaaaacttctcagacgaaactgagaaaagtttactttccgaagatacagctgagaagttttttcatagggcgaatgcccgcgaccgagaaaatgcgtagcattttggaggttagcactgcaaaaaagggaaaaacagaacaggagaataaaatgcaggcaatcttattagccggaggtttgggaaccagacttcgcagtgtagtaagcgacagaccaaagccaatggcactgatcgaggataaaccatttatggaatatgtgaccagggagctggtgcgcagcggcattacagagatcattttcgctgtaggctacaaaggttccatggtggaagaatattttaaagacggaagtgaattcggcttccaggcttcctatgcctatgaggaaactcttttaggtacagcaggcgctattaaaaatgcaggtaagtttattacagaagaccgtttttatgtgttaaacgcagacaccttttaccagatcgactatacccgtctggcaaaacagcaggatgatcagaacctggatatggctctggtgctgcgccaggtgccggatgtgtcccgctatggcaaagccattttagatgaaaatggcattctcaccggatttaatgaaaaaacagcagatccggtgccgggaaccattaacggcggtatttatcttatgaaaaagagcctgttagaggagattccggagggcaaagtatctcttgaaaatgagatgatccccaagtggctttctgaaggaaagaaactgggcggttttgtaaatgacggctatttcattgacatcggtattccggaagcatatttccagttccaggaagatgtaaaaacgggagttgtacattaattatcggcatacatgggtccgaaaggagaaaaactatggtgatcagaggcagagcgccccttcgcgtcagctttggcggcggcggcacagatgtagcaccattctgtgagcagcagggcggcgctattatcggaagtaccattaataaatacgcatattgttctatcgtaccaagagaggatgaccagatcatcgtccactctctggatttcgatatgacagtaaaatacaacacaaatgaaaattatgtctatgacggacgcttagacctggtaacagcagccttaaaggcaatggatatcaagcagggctgcgaagtttacttacagtgtgatgcacctccaggctccggccttggaacctcttctaccgtcatggttgctatgcttactgctatggcacggtggaaaggtattatgttagatgcctatgcaatggctgatctggcatatgaggtagagagagaagacttaaagatcgatggcggataccaggatcagtatgcggcaaccttcggcggctttaatttcattgagttccatggacgcaacaatgtagtggtaaacccgctgcgtattaaaaaagacattatccatgaactgcagtataacctgctgttatgctataccggaaagatccatgtttctgccaatatcatcaaagaccaggtgcagaactatgagaagaaagatgcttttgacgcgatgtgcgaggtaaaggcactggcttatgccatgaaggatgaactgttaaaaggcaatctccacagttttggcaagctgttagactatggctggcagagcaaaaagcgtatgagcaataagatctccaatccgcagatcgacgagctgtatgcagaggcattaaaggccggggcgttaggcggaaagcttttaggagcaggcggcggcggatacctgttaatgtactgcccatacaatgtgcgccataaagtagcagcccgtatggaagctatgggcggacagttagctgactggaactttgaacttcgcggcgcccagagctgggtagcagacgaagaccgctggcagtatgacaaggtaaaagtacagatgccaaacggagaatattgttttaatctgaaataaaaaactataaatcgttatagaaatgggaaacaatatcgtggaacatacattaaataaagtagtatttttagaccgggacggcactttaaacgaagaagtgaattatcttcataaaccggaagatatgaagcttcttccgggagtgccccaggctttaaagaagctgaaagatgccggatataagctgatcgtagtcaccaaccaggcgggagtggcaagagggtattatacagaagaagatgtaaaaatccttcaccagtatatgaaccagctgttagaaaaagagggagcagaaattgatgccttttattattgccctcatcatccggtacatggtatcggtgcatacaaaaaagtgtgtaattgccgcaaaccgggaaccggcatgtttgaaatggcagaaaaggattttccggtggacagggctgcttcctatatgatcggggacaagcttcttgatacagaagccggacagaaatttggagtcacctctattttagtaggaaccggatatggggcagagcttcataaagaacagcaggaaaatggtgaaaaaccgccgtatgtccactatgcagctgatcttgaacaggcagcacaatggatactggaaagaaaataaaacctggaaaaagaagttctggcaaaaggagaaaatcgtatatgaaagaacttagatttttggatgaattagtacagcgttatccggtgcttgagccggtaaaaggagacatccttaaggcatatgagatcatgagagactgctatgaaaagggcgggaaactgatgatcgcaggcaatggcggaagctgctctgacagcgaacatattgtaggagagctgatgaaaggctttgtaaaacgccgtcctgtatcagcagaactagcccaggctttaaaggcagcagaccctcagatgggggaaaaactggcagaaaatctccagggcggacttccggccattgcactcaccggccatggggcattgactaccgctttttccaatgatgtaaacggagatatggtatttgcccagcagctgtatggctacgctaaaaaaggagatgtattcctgggaattacgacttccggcaattctaaaaatgtgctttatgcagcaactgcagcaaaagcattaggtgtgactgtgatcggactgaccggccgtgacggcggacggatcaaagaattttcagatatatctatcatcgttccggtacaggaaacctttaagatccaggaactgcatcttcctgtataccatgccctgtgcttaatgctggaggatcatttttatgagtcataagcatgtatatgcgatccctgcctatggggattctccttatctggaaagctgcataaagtctttgaaagcccagaatgtaacttcgccggtgatcctttgtacttccacaccaagcccgtttttgggagctatggcagaaaaatatgatctgccctactacatccgggaaggaaaaagcaatatccgggatgactggaactatgcttattccatggcagatgcagagtttgtcactattgcccatcaggacgatatgtactgcaaaaactatggggaagaactgttaaaggcagctgaaaaatatccggatatgactgtatttacctctgattatgccattgtgaaaaataaaaaggtaattaccggggataaaatgctgtgggtgaagcgtcttttacgtcttccccttcggtttcatattctttgcggtttaaaatggataaaaataatgcccctggtacttggcaatcccatctgctgtccggcaacaacctacagcaaaaagcggttgggagaaccatttgtccagtctgagtatcagtttgccttagactgggaccacatggtacagctggcaggagaaaaaggcaggtttatctgtgtggaaaagccgctgatctattaccgggtccatgagggcgctactacaaatgcctgcatcaaagacaaccggagagccagggaagaggcagaaatgtttgccagattttggcctaaagcggtagtaaaactcatcatgaagggatattcttccgcttataaggaatacgagtaaagagttaaaaggaacaagttaaaatggggagtagacgagggaaagaaggtcttttgctggctgtattctgggtggtggcaattgctctgatcgggacagctgcaaacagactgatacttcatggccctttggggagaacattacaaaagaaagaaacaggacggatgctaatggaactgtctgtcctgtttttatggaatttatggtggttatgcctggcagtaaaaagcagggaaaaaagaggactggctatagcctgtctgatacccggctggcttttgttcctctggggacacaggatactgatcccgctgataggggctggtgtgtggatgggaacgctggctggatatggcatttgcatcaacaactgttttttggaaaatattggaagaaaaaacaaagttatttttcctgtctgggagaagatccttctggggctgaccaccggaagcgcagcatggatggtccttgtatgtgcagtatctcttacaggacatgggggaatcgggctctggagaaagctggcgttgctgcttgctctggggattacggcaattttcctgtggaaaaataaaaaaaattttggcaggtctgtggataactgtctgaaaacagaacagattgcagatatgtcagggatgaaaaaacagaatgtggtcagtaagtgcagcaatctattccgtgcagtcatgccggaaaccgtgcttcaggcagctcttcttgcgttcatcctcaccatgttctttcttcaggcaggccgtttaaaccatgaactggactatgactctctccactatggactgcgttccgcctatgtcctggataatggaaacggtatttataaaaatctggggctgatcaatctggtgtatacctacagcaagggagcagaagtactggtgcttcccttatccggtacaccgacttacggatttgtcctttcctttactttctggacaaccatagtcagtgtagtgacagccgcagttatgggtgcgcgtttcagcggaaaaacagccggtttctggacaggagcgctggtcagtgcgatcccaggtattatgaatatggcggtttctgctaaaagtgacagtattacgttaatgtgtcagcttattatttatgattttctctgtctggcagttgtcagagaaaatatatggctcatctttgcggtagctgtttatcttctttcactggtttacaaaccaacggctcttgtattttctacagccttaggcggtgtggggcttgtcagtctcctgatctttaaaaagacaggaaaaccggaaaaaagagcatttttaacatggatcctgccattatttgcaacagcaggattgtggtatcgaacctggctgcttacaggagttccggtaacttctgtatatgcaaatttctttgaaaagataggttttaaagtaaaatatccctataacttttcccatgtgatcggtgatccgtctgtcctttccaggggagaaaaaatacaccggctgctggaacggttaaagggagtactgatctctccggtaggagaagatatggaacacgtgatcattgcctggggaacagtgcttgtaacagcactcctgttattctggatctttcaggtaataacgaggtttataaagcatcagcagatctcccagttagatttctttgatggttttcttatgatcacactgttaattggttccgcggccagcatttacacacttgcccagatagatggaaattatttcatactggtgtatgcagtagcggcgatcagtaccgtgcggatcacaggatactggctaaaaacagaagagacagaaaacattgccgcagttacaacaggcagtgcagcagtggaaacgaaaaagatcctcaggtccggcatctgtttactggccgttccattctttctcttcaataccctgatcgcatcctctaccagctgggcaggatgcccgggctttacctcttttaaactggtaaacagaggatattatgaccatcgtcatcatacacataaaagctgggaacgaagaggctgtaaggaactttattcccgttttacacctaaaacccgggtagtagcctttggctttcacccccaggtgttagatatggcctgcagcgtccagagttattatgatataacaggaagcggtggggatgtgtatcttgtaaaaaaactggcatattttgaagaatatttaaaatgggccggaaccgaatatatatatgtacaggcgggatatctggcagaccagcccagagccacacagatcatcgaagatatgatcgcagaagggaccttaagagatcttacctttgaatggggaaatatgctggcaaaagtagatctggatcatccatttaaagaaccggatgaacgattagtacagttgttccgtgacaattacagcatggagaaaaacgggaactagtttaaggaggcagaaatttggacaccagggaaagaattaaattcaggatcggattttccagaatggagaaaaaatatgagtggaaggaccatgtgatcttcatgggacttctgctggcattagctgtgtgggtgaaccatggaatacagatcaaaggcctttatatggatgatctgtatttctggtcctgttatggtgaacaaagtttctttgaatatgtatttcctatgggaagcacccgtttccgcttcctgtattatcttgcagcctggcttgaaatggcagtggtaagaaatcacgtagctcttttcgtgcctattaacatattgctgaatgcagcactgtcctggtatctgtattccattgcctggcggctttccagggcaaaagccatcggcttctttacaggagccatgttcttagccagccggatggcgtattatcagatcggtcaggttttaggactgatggagacaatggctctctggatggccatttccattctctggaatttatatcgttatgtaaacgaagaaaacagggaaaaatgtttttacattgccagcctgctgtattttggagtatgtttcgtccatgaacggtacatgacactgctgccattattacttttggcccttctcttaaaacagtgcaaaaaaatatccctctggctcagtacaattgtctcttttggactggtacagctgatccgtgcctttaccattggttctgttcttcctgcaggaaccggcggaacccaggtagcagacaccttaaatattttacaggccatcaaatttgccttcagtcaggcggcctatgtctttggaattaacgcaggaccggaacacttaaacggctgcccatggagtgaaagccctatgtgggtcaaagggctgatcggtatggcagacgggatgctccttatcatggtactggcgtttctggtaaaattcatcatggaaaaacggaaagagcgtaaattttccatgctgtttaataccatgctttttatcggttttattgcattaaacattgcatcttccagcgtgaccatccgtgtggaaatgcgttggatctatgtatccctagctggtgcattgctcttcctttcctatatctacggagaactgacagaaggagtaaaaaaagaactgtatttaaaacgcctgtatccctggggcattctctttgcactttacgtattacttatgcttccggcagaactgttctaccgcagctgctatccaaaattgtatctgtggccggatcagctgcgctataattcattagcagaacagacctacgaaaaatacggaaacgggattttcggaaaaaccatttatatcattggcaacagctacgaaatgagcgattttacggctcgtaccttctttaaagtatttgacccgaaaatgaaggcagagggcacaaaggtagaatttatagacagcatccgtgatattggaatggtagatgaccagatgttagtcctcagagaagatcctgctcataatgcattccaggatatcacagattttgtccgcagcctgaaactgcagaccgattacggatactattccgacggctggatggatgaacacgcatccctcactgtgatggcaggttccaccggggaaatagaactggaatttatgtatccgggagtaatgagcggcggggaagccatttccattacaaaagatgaagaaccggtccgtacactgcctcttcattccagcgtagtagaaacaaccctacaggcagaaccatggcagatggtccatctgcagtttgattataatttctatatgcagaatgccagagaacaaagaggacaggaccggctggcagccatcgttcacattacaacaccgtaaaagaacgtaactatacgcaggaggagatcacatgaaacttcccggaaacagggataaaaaaataattgacggtacacacaggatagttttttaccttctgcctcttctgggactggcatttctcctgtggtatattaaaaatgcagcctgcgatgtagtctattccgactacatccgcctggtaaacagctatctgccagatgtatttaaccctgaaaaattcttcgtggcagatgtgcttacccgtattcccatcaattacctgtcccgtatcataaacgtaaaattttttggcttttccattacctttgaccgggtattaggtgctgtaagcgtcagtcttgcagcctggtgttttgcagcatattcccgtcagctgaagataaatataaaatggtttatcaccttcatgatcgttatgttcagtctgaacaaatgggagatgctgacaaatggaagcggctggtcccatttctttgcctttgcctgcttttattatcaccagatccttttcgaccgatattaccggggacaagagcgaaaatgggacaaaacgatacttatgctgcttccatggctgatcatactggggacagccggtccctactgcgccatctatgcagttgttatgatactggcatccggtgcggcagcatttatggatacaggagaaaaaagaaaacagtatgtgatctttcttatctgcacactgatcccgctgctcctttacattctcagcaattcctttgcagtagaagaacatgcaggggcaacaggaagatccttaggggaaatattaaaagacttccctacatttcccatccgttttatcctgaaatccctggcaggaatgatggttggcggtgaagaattacagcagtggatcgcaaatggttgtatttccaacaaaatcatctatctgctgggagtcatacttatggttggctatctgtggtccctgtggctgaacataagtcttggcatttataaaaaaacattctttccgttaatactccttgtatccggcggagccaatcatcttctcatcttcctttcacgttacatttttgaaaaagaagattatgccttaagctcccgatatgccctgcagtttcaggtaggagtcctggggatccttctcacctttgccctggcttcccaaatacgcaggaaacgtatcaatggaggactggtaaaacggacagtgcctgttcttgaaactgtcttctgtattgcaatcctaattggaaatgggtatactacttatcgtgagatacagaaagcaccttacagagaagagaactttgaaaaaatggcagaaatggcaccacagatcccatttatgtcagatcaggaattaaaagaacattcaaaagaaatagatgatctttacgaataccgtaaaggaacagataagatccgggatgcattccgtatcctggaagagaaccacctgaatatcttcagggaccggtaacaatatatcctcccacaaatgtgggagaacatagatacactctcggaggaaaaagattgaaaatgaaagtagtaattttagcagggggcttcggcaccaggatcagtgaagaaagccatttaaaaccaaagccaatgatcgagatcggtgaaaagccgatcctgtggcatattatgaaatattattccgaatttggataccatgactttgtgatctgtctgggatataagcagtatgtagtcaaagaatttttcgcagactatttcctgcatacatccgatgtcacttttgacctggcaaacaacagcatggaagtacacaacaactattccgagccatggaaagtcacactggtagataccggtttaaacactatgaccggcggccgtgtaaagcgtatccagccatatattggaaatgaaccgtttatgcttacttacggcgatggcgtttccaacgtagacttaaatgagctggtagcattccataaatcccatggcaagatcgcaacgatcacaactgtcaatctgggacagtccaaaggcgtgttaaacattgcagaggacaatacagtcctttccttccgtgaaaaagacgataacgatggcgctctgatcaatggcggtttcatggtcatgaacccggagatcttcgattatctggaaggggactctactattttcgagcagggaccaatgcagaaactggctgcagaaggccagatgaagtccttctatcatggcggtttctggcagtgcatggatacacagagagaaatgaaaaaactggaagaactgtggcagtccggaaaagcaccatggaagatctggaaagactaaggagtaattatggcattaacattagaagaattaaaatcattctataacggaaaaaaagtgctggtcacaggacataccggatttaaaggttcctggctggtacgcatccttacactggcaggtgcccaggtaacaggctatgccttaaatccgcctacagaccccaatctctttgagatcgcaggtctggaagacaccattcacagtgtagttggtgatgtgcgggatctggctcatctgcgccgtgtgttcgatgaagtaaagccggagatcgtattccacctggcagcgcagcctatcgtccgcgagtcctacaaagaaccggtctacacctacgagaccaacgtaatgggcacggtcaacatcctggaatgtgtccgccttactgacactgtacggtcattcctaaacgtaacaaccgacaaagtatacgaaaataaagaatgggaatacggatacagagagtgtgatccgttagacggctatgatccttattccaacagtaaatcctgttccgaactggtaacacacagctataaaaaatccttctttgaagacggacgctgtgctatttccacctcccgtgccggaaatgtgatcggtggcggagactttgcaagcgaccgcattattccggactgtgtccgcgcagcagcggccggaaaaccgatcatggtaagaaatccacattccaccagaccgtttcagcatgtattagaaccgctggcagtttatctgaccattgccatggaacagtacaaagacagcaaatatcaggattactacaatgtgggaccagatgacagagactgtgtaacaacaggcaccttaacagacttattctgtaatgcctggggagaaggaatgacctgggagaaccattgggtaggcggacctcacgaagcaaatttcctgaaattagactgctccaagattaaaaccgtatttggttggaaaccaagatacacagtaaaagaagcagttgaaaagacagtagaatggtccaaagaatacttaaacggtgcagacatgttagaagtaacagaccgccagatccgggaatttttcgcttaaggtgtttttagggagtgttatcctgttccggttgcaaaattgtaaagacgttaatttggttgattaggagataaaaatatgtttgaacatacaacagaagcagaagcaagaaaacagatcctggatctggtagctgattactgcgatactttccataaaaagaaagaatacaaagagggggaccgcattccatatgcgtccagagtctatgaccacagcgaaatggtcaatctggtagacagttccctggaattctggctgacttccggccgttataccgatgaatttgagaagaaactggcagaatatctgggtgtacgttactgctccctggtcaactccggttcctccgcaaacctgatcgcatttatggcactgacttctccactccttggtgaccgtcgtgtaaaccgcggtgatgaagttattactgttgcctgtggttttccaacaaccgtagcaccaatgatccagtacggcgcagtaccggtattcgtagacgtaaccattccacagtataatattgatgtaaatatgctggaagaggcaagatctgaaaagactaaagcggttatgatcgctcatactttaggaaacccatttgacctgcgggctgtaaaagcattctgtgataaatacaatctgtggctggtagaagataactgtgatgctttgggaacacagtatacaatggaagaagatggaaaagaggtagtacatttcagcggtacagtaggtgatatcggaacttccagtttttatccgcctcatcatatgactatgggagagggcggcgctgtttacacgaataatccacttttaaataagatcatccgctccttccgtgactggggaagagactgcatctgtccatctggacatgacaacctgtgcggacaccgctttgaccgtcagtacggcgaactcccagtgggatatgaccacaaatatgtatattcccatcttggatataatttaaaggctacggatatgcaggctgctattggctgtgcccagttggataagttcccgtctttcgtagaacgccgccgtcataactttgcaagattaaaggcagcgctggctgactgcaccgataaactcatcctcccggaagcagcaccacattccaatccaagctggtttggatttttgatcacctgcaaggaaggaacagacagaaatgcagctgttcagtatattgaaagcaaaggcgtacagacacgtatgctgtttgctggtaatctgatcaagcatccttgctttgatgagatgagagcttccggaaccgggtatcgtgttgtgggtgaactggagaatacggagaggatcttacgggatactttctgggttggagtttatccgggaatgaatgatgagatgattgattttatggcgaagactattcgggaggctgtgagataatcgcgagagggctgagctgatttcaggccaagagtctgtcgcgagaggtgtgaaaggttttctgaccaaggaaatgtcgcgaagggtccgaactgaggaaaggagtccttttttcatttttgcattgtccactggctttcggcatgcacctgttcgcctgcatcggactatgtccgctgcattcggacagctgcgctcaagatgtggacacttgcaaaaatgaaagcgtcccccttccctcagttctacaatataggcgtgagtgaggaaaaatatatgtgcagccagcttcgctggctgcaaaagtatatgcgtttagtaaaggaggggaaatggctatatggcagaaaataaggtaagtgatacggtaaatgatatggtgaatagcatggtggaagacataaatagtgcgcagaatggtagtaacaaagttagtgctataaaggataacgttggatatgacatgagtagggtacattcggctaaccttaagatccttaaggaaatagatcgtatttgccggaagtataagatccaatatgcattggatgcgggaacacttattggggcagtacgtcataaagggtttattccctgggatgatgatgcagatattgtttttacgcgtaatcagtttgaagcatttaaaaaagtagtaagaagagaacttccagatacaatggaactggtagaaccagacagtttccatggaggaaaagcattttttgactttactccacgtattatctataagaaaagccgtatgcatccggatagcgataagatggactactatgatggaaaattaaatcacctatgggtagatctgtttatcctggacaagcttccaaaaggaaaggctgcagcggagatcacacgtttccttcataaggcagtttacggccttgccatgggacaccgacatgacctggattatacaaagtacagcctgatgtataaagtttttgtaggcggtcttgcaacaataggcaaattcattcctatgaaagcaatcttctttatgcagaaggccattgccctgaaagacagacacagtaaaggtgatctgcgctactacagcaattatcagccggattatctttatgtaacattgcacaaagactggtgtgaggaagtaatagatgcaccatttgaagatacgacgcttatgatcccgaagggctgggatccggtccttaaagaagtatatggggactatatgcagcttccgccggaagaaaaacgtgttccaacccattccagtttacagatacaggtatacgactaatgaacaatgcagcagaaaataacacacaaaaaaataataatggcataagccaaaaagacgatagatgttgtaaattatctgtagtcgtatccgtatataatgaagaaaaagcactaagagaattctataaagaaacaaataaaatcctggaacagataaaaaatgccggttgggaacatgaactgatatttgtaaatgacggcagtgcagataatagtctgagtattttggaagaaatagctcatgaagaccatgatgtaaaacttatcagtttttcaagaaactttgggcatgaagcagcaatgatcgctggtatcgattacagcaccggagatgggatcatctgcatggatgcagaccttcaacatcccccggaatgtatcccagagatcatcgaaaagtttaacgatggttacgaagtaataaatatggtacggacacaaaacaagtccgcggggctggtgaaaaatataacatcttcaggcttttactggcttatcaatcacatctctgatgtacatttcgagccaaatgcctcagacttcttcgccatcagccgtcacgtagcccaggtcctgaaagacaactatcgtgaaaaagttcgtttccttcgaggctatgtacaaaacgtaggtttcaaaaagaccaacatagaatacgaagccagagccagagtagcaggagaaagcaaatacagcatcaaaaaactgttcatattctccataaatacgatactctgcttctccaatatgccactaaaactgggaatttacgcaggtatgctatcagcatcccttggggtagctgttatgatatacacccttttcacccgacaaggtgctccaagcggctatgcaaccatagtagtccttctctgcttcatgtttgccatgatgttcctgctaatagggatcatcggcgaatacattgcaatcctcttcacagaactaaaagaccgcccagtttatattgtagaaaagacagaaaatatgtaagatacctccttcgccccattctaggggcagaggaaaggtctttggggtgtcctatgtacgggctatatggaaagatggtgaaatatgtttgcaagatatatagaaatatataccacattagacatggaaaaatattatcgtgtaaaaaacatttttgcggaaaacaaaatcccatataaagatacaagcaccaataatcaactccgtctgtctttaaataatgtccgtggcactaatcctgcccttttacgagacagcggtgtaaaaaacacctactctatatccgtaaaaaaagaagacgaatacaaagctaggcagctaatacaaggtagagtataatcagtctgtaacataatgggaaatgcctcagccatcattggctggggcatttttaagtaaatgatatacattcatgagatgaggaagtttgtcgcaagcgaccgcgttcgtcgcaagaatgcgcacttgcgcaaataatctttaactaagacgatattctcccgccgatggcgggagaatgaggataccaggccccctcaggcgaaatgaattggatgggacacatgggatgcgcaggctggacagacttgggtttgagaaaagggcgttaagagaggggcgggcaactgtttgaacgaagtgagttttgcccgcccctctcttgtttttagcccttttctcaaatccttagtctgtccccgcgcaaatcccccgtgtcccatcccatccatttcgccgtttgtttataaagttttaatccttcttcctattgactttcccaatcaacatatatataatctcaaaagtgacaacggtgacaacatgtcacaaataacaccctgtcatctatacaaataatatcaaccatacaaaagccaacaaggaggcaactacatgccaacccagcgttttttaaacttaaaagactcaaaaaaaaatgcgatcctggaagctgcagcccacgaattcgccagagttccctactccgcagtatccattaaccagatcatcaaagaagccgaaatatccagaggaagtttctacacttactttgaagacaaagacgacctgatgcgctacatgctcagaggatttcgtgataccttaagaaaaaaagtatttgaattcttagaagaagaaaacggcaacccttttcgcctgtgtatccgtcttctgaaagactggataaaaacaggaagtgagcgtattacattccagatccacagaaaccttctggcagacctaagcgtaacaggacagaaccagatgtttgggatccgtggttttctgatgaaagacgaactttataaatccttcgtagaagaattgtacaaccgcttagacaaagaccgctacccgaccacaatagaaacattgtgctacatagtagacatggcaattatgatcctgatcaaatccatggcaatgtattaccaaaatccttccgaaaaagaaaccatcatccaggtattaacagaagaaatgacgatcctggaaagaggaatgtgtacccagacttcacagcagtcataaacgaaatgaggagacttagcaatgaaaaatatcacaaaaaaaatcacacggatatccactgtacttacagcatccattctgtcagcagcccttccacttacagctctggcagcccagaacagcccggatgataatacctatcagccaaaagacgttcagacagtagactacaaaaaaagtttaactccggaatttgcctattccgcagaaaaatgggcaacccttcgtgacaacatcatggaatacggcgaattagcagacctgatccacgaatacaacccaaccgttttaagcaaccgttccacttacaaagaccagaaaaacaaaaacttaaatgacatctatgacgactatatgaaagacattgatgacatctgggatcaggctgacaacgcagacaacgatgtaacctgggcttccctgcgttactccgcaggccttttaaccaaacaggcagacaataactacgaagacgcggaaatggaaaagatccagtatgaccagcaggaagcaaaactggtataccaggcacaggaaatgatggtttccttagagcagtccgcatataacctggaaaacttacagagtaccagagatcttctgcagcagcagtacgaagcaacccaggctcagatgtccgtaggaatggcaacccagaccgatgtccttacagctttaaagagtgtacaggatcaggatacagccattttaacagcaaaaaagagccaggaaaatgtacacagaaatctgtgccttatgttaggctggagcgcagatgcacagcctgagatcagagaagtaccacagccggatttatcccgtgtagatgctttagatccaaacgcagatgcccagacagccattgacaacaactatgatgtaagatactacaccaaaaaagcaggcaacttaacaagccaggatctgatcgagtccaaccaggcagctattgtaaatgcaaaagatacagccatccgttccttaaaaacacagtacaacaccgtacttactacaagagactccttaaatgcagctaaagcacagctgcaggtagcagaagcaaatttaaaccttgcccaggcaaaccttgcagtaggaagccagaccaaactgcagtaccagagtacattaaacacctatacatcagccaaaaacgatgtaaacaccaaagaattacagcttctcctcgcattagaggcctatgactggaatgtaaaaggacttaccacctcaaattaatagatgcactcccggaggctttctcgcaagatcaaatacaaaaagacttcgagagtacatagagagaaaggacaaaaaagatgaaaaaaaatcatttaagctccatgacagcagccacaatggcattcctgctggcagcgtccgctccttttcaggcattcgcagaagaagcaaacccggacagcagctattctgttgatcaggaacgccttacagataatcagttagactatgacgaaataggtgccagagtaaaagaatattacggtcccatcaaaagtgcctacaacatggtacggggaatgacagaagatcaggggcagatcgcagttaatgagaggaccatggcagacgatcttatttcccaggcaagagcagcagaagaccttgccaaagaccagacaggtatggatcagatgatcaacaaggcaacggcaaaagcgctgcgtaagactgcaaatcagatgcgtacaatggccaacaatatggaccggtcattatcccggaagaactcttctgaaaaacagatcgaccgccaggccaacagtttgatccttaatgtagaaatgatgttaaaccagtatcagcagctgcagtcccagcgtactatagcagcaaaaggtgtagaactggctacagcagcaaaacagctgcagaacaccatgcaggcccagggaatggcagttgacgcagatgtactttccgcagcagccagcctttcttccggtcagtcccagttaaatacactggatgcaggaattgagcagatctgtaaaatgctctgttcctttaccggatacgacgaagcatctaatccagtattcggagaagtaccggcagcagatccatcctacattgccacagtcaatgtagcagaagataaagaaaaagcagtaaataacaactacgagctgatcagtctcagaggacagacaggcggcggaatgacagatctgcagatccgtacctcaaagacaactacacagatcgccaataaactgcgcaatgtagaatattccgaagaaaatgtccgttccaatatccaggcgctgtatgatgcaatggaagaaaaaaattcctcctattcagcagccaaaacagcctacgaaagcggccagatctcctggcaggcagcgcaggtgcagaaggccaatggcatgctaagcaacatccagtatatgcagcaggaactggcatggcttcaggcacagtccggatataaatgtgcagacctggctctccagcaggccatccagaattacaaatgggcagtagcaggtgcttccgtatctgcggacacccagtaatgatcatatttcaaaataaataaactaaatcttccaaagaaaaagcggcagttgtcaaaaaagtaacaactgtcgcttcttaattatcaaaacaaaagaaaatataactattgcacataaaaaaatgataaattttgtaacaactggttgttattaacaaaaagtggtgctattataaacaaaaggggaatataataattcagtagagggagtggaacatgctgtagttttctgaaattgaggtgatgtgaatggtaaccaggagtttggacgtaagaaaaaaggcgctgaatccaataccgatttcttatctgattcagaccgcaaaccgttttgattgtgacattttcgtaaccgatgacaaaaaaacagcaaatttaaaacactacgaagaaatgaaaaatttaagtttatatggttttctgaccatatgttttaaggggagagatgaaacagaggcagataattgtataagaaagatcctatggcaggatgagtattacatgtaacagacaaggaagtgtaaaaatgcacagtaacgtataaacaggagacctggaaggggacgtctcctgtttttgttatgataccagatttttaaccttttgaccctgtatcatgcaaatatgcatccgcatccttaaaaaagctccacacgatcatcaggataataaatccaataggaaaagcagcgacaatggatacagactgaagactgctcatggaattttctgaaaagatcagtgcaatagggaaaagcattaaagtaatggcccagaacagttttaccttcttatccggctcttcatctgcatccagggagcggtaggaataggaacttgccaccatggtaagggcatcgaacgtagttgcataaaaagcgatcatggtaacagccagtaagatcagtccaaacctggctgcaggcattgtctcaaaaacagcgatgatcgcctgatacagatccccggtctcccggtacagtcccattaaatctaagatcccatgagtctgaagtcccagaccataatttcccaatatgataaaagaagtaaaggtgccagcaagaccaaagaaatagccgcctaaaacagtctggcggatggtccttcccttgctgatggttccaataaagaacggggttgccacacaccataccatccagtaagcccagtagaaaatcgtccagttctgtgggaaggaagaggtgcgaagggcatcagtccaggtagccagagaaataaaattctgggttaaaagtccgatggcagtgatcccggtctcaatgatgtagcgtgtctgaccgcctaaaaacaggaagtaagctaacagcacaaaaaacagatagatacaggaagcagccagccgtgtgactccctgcatgccaaaatatacagccagtgtgtatacaatacagatgatcactaaaatagcaatggtaagaaggggcgtctctgcaactcctaacaccttgcttaaagccatggataaaagaggggtagccagtgaaaaggtagtggcagttcctgctaagagagcaaaaacagcggtaaggtcgatcagttttccaaccactccgtctactttctttccaagaagaggacggcaggcttctgagtatttctgtttattcctgcggcgcacatggatcataaagccaaatgcaacagccaggatgatgtaaaagctccatggaataggaccccagtggaacaatgggtaaacagaagtccagtcctgaatggaacccatctcagaaatatgagactcatctgcataaagcatccactcacagagagaataaaaaaggatatctgcagccagtccggctgtaaacatcatggaaccccactggaaagcagtatactgtggtttttctacatcccccagtttaatagaaccaaagcgggaaaatgccatatacagggaacagatcacagcccccagtcccattaacagataatagctgccaagctggtcgccaaggaagaaacggatggaagcaaggatattggcagagccttccggaaatatcataaacagacagcataacaatgtgatgcatccgaaaggcaggatagtggtgacccagtcaaggttctgcaaaaatgatttctgtttcggtttcatgaaaatgacctcctgttaaaaaataatatgttcaaaaaaataaaaaattaaatcatattgaacatgatagcaccaataagatcaaatagcaagctacatttcacagaagtttcatataggtaacaattttgtaagaaaaaaccactgttaaaattgtggtttcttcgttataatagtaccgttgaaaattaaggaggttttttgtaatgtttaactggaaaaaggtttctctgatccttctggcatcagcagctcttttaagcggctgtacccagagtaatattgtttctccagcagatggaaagatccagggagatggacagccggatacagagatcgataaagatattaagatcgactgggaagaagtacgttcagacctggaagagcagtatttagagccatatggtgcttttgctgattatgtaatggacttaaacgttgtttatgatgacgaaaccggtcttctgactgtactgctgcctgttacccgcaagactaccagcgatgtagcagtggtttatgcacaggatgttttaggaagcattggtgagtctgtagcaacccagaacttctattatacagcaccggaggagaatgaaaacggatttactaccagctacggcagcttcttcgatgatcatgatgtaaaggtacaggtattcccttatgataaagaaggggacgaaagctcttatctggtaaatgacaccattaaagcaggggatgtcagagccgttgagccggtacagtaaggagagggaaaatgagacggatcgacagatactggaaacgctgcggggcatgtctgctggcagcagttacactgatgctgggacagggaaccatgcagtcttacgctatgaatgcgcaggttattaattccccagacaggatcgttgtacaggatgaaaataagaatacaggcaatcagaataataccaatacacagacggtaactactaaggcagaggttgccggatttggagaagtatccactcctgttacagactcttcctcttacttcggaaagggaaggctcactcttctggcaaatcatgatacagcagcccagcagctggcagcgatcattgaaacgggagagggcggtctgatcgtagtagatggcggctggacagacaacacagactatgtattaaatcagatcaaggcaaaaggcggacatgttcaggcatggctgatcacacatcctgactctgatcacgtaggtgccctggcagatattctttataagcatgcaggagagatcaccattgacggtatctattactccttcttagaagacagctggtacgcagaaaaggacgcaaatgttgcttctatggtggcatatgtaaaaggcgcatttgcaaaaatttctccatccgttcttcacggtgatatcgtagcaggacaggtgatcaacgcaggacctgcaaagatccaggttttaaaccaggcttacaaagaaaacaatgactttgtaaataacagcagtgttgcttatatggtatctttaaacggtaccaatgtagtgttcttaggagacttgggacgtaccggtggtgaacatctgatgcaggatataaaccttggagctttaaaatgcaagatggtccagatgtcccatcacggacagaacggtgtagactacgaagtatacaaggcattaagaccatctgtatgcttatggccgactcctcagtggttatgggataatgataacggcggcggagcaggaagcggttcctggaagacacaggagaccagaaactggatgacccgtcttggtgtaaaagagtattatgtcaccaaggatggcgatcaggtgatcgaataattcggaaacagaaaaagtaaccgtaaaattgaaacgttataattagacaaaaacgcaaaaaagatcgaaaattccagaaaatgggaatttttgatctttttttgatatgacatttcattgacccgctgtcataaatgtgggataatcggaccatacgcaggtacatgatacatgtacatacataggaaacagctgatagacaacttaagggggaagctaagatggtaaaggtgtttctggtggaagatgagtccatcatccgtcgggggatccgtgacaatattgcctgggagagtcatggatttgaatttgttggggaagcaggagacggagaatatgcctatccgttgctcttaaatacaaaaccggatattctgatcacagatataaagatgccgtttatggacggactggaattaagccgcctggtgaaaaaaagtctgcctaaaaccaggatcatcattctcagtggttataatgaatttgaatatgccaaagaagccattaagatcgggatcagtgactacttattaaaaccggtaacttctgtaagtttactggataccttaaaacatgtagcagatgagatcagggaagagcaggaaaaatccaggcttctggaacgctattttgccagctatgaaaaatacacggaatttctggacaataccaattatacaggggtagaccggaagctgatcctggattttttgaagttaggagcaatggaagaatgtgatccttttgtggaagaatattttgctgcgatcggtgagaacaattatcagtcattgctgctgcgccagtatcttaccatggatattttctactgtatccaggaattcttaaaaggactgggagagggaaatgtaacaatttcaccggaagttacggatattaagcggatcccaaaagtgatcgtcagcgtggatacgaccaagatgtatctgaaagagcagtttcaggcagccatcgaggcaaggaacagtgtctcaaatgaccgttatggaagtgtgatccaaagtgccaaagagtacatagaaaagaacttctccaacggagaactatcattaaacaggatcgcggcccatataggagtcagtcccagctatttcagctctattttcaagcaggaaactgggacgacttttgtggaatatcttacgaaagtacgcattgacaaagcctgtgaacttctgcgctgcaccaacagccgcacagcagagatcggggagcaggtaggctacagtgatccccattatttcagcgctactttcaagaaagtgatggggcagtcaccaaaagactacagggcaggacaaaaaggataaaaggggcatagagacatggaaaagaaaaagaagttttacctgtcactgaaaatgcgtctgctctttttactgtttgtgatcgtgatccctcttacatttatggtagccggctatcagcgtatgtttgaaaattattcccggtcctataatgagatcatggcaaacctgaaagtggccaatgaatacaatatcaagtttaaatccgatatggaatattccatgtaccgggtcatgatcggtctgatcgatgtagataaatttgaaaacggggatattttagaggggaagagcaagtatgctacagtggtgaaaaatcccctgaacatgattgcatctgcccgtcatgcctttggaaagtccattgagcgggtaccgggatcagacggtgatattaagataaaaggtattttatcctgtttagactctctggaaaaggcagtcaaccggatgatcgacaatgcctctgttacaggaagatacgatgaaaatgtaaatatctgggaaaatgatatccaggggctgtgttccatgatccaggattatattacccagtatacctactatgagatgatcaatatggagcagctgcaaaaagaactggaacagcaggtgaccaaacggatccaggaatatatggttttgctggcctgtgtgctgacagcaggcactttccttgcactggccatcacaaattccattacagggcctttgggacggctgcagcagacggcagaacgtctgggaaagggagatctggatgcaaaggcggatcttggcagtttagaggagatcaatgtactggcccgtacttttaatcatatgagtgagcggatccggcggctgttagagaaaaatacccaggagcagaaaaatctgcgggaggcagagctgcggctccaccaggagcagatcagtccccattttctttataatactttagactccattgtgtggatggcagaagggggaaataaccgtcaggtagtggaaatgaccacagacctcagtgatttcttccgcaccgtgctgtcgggaggaaaagattttattacagtggaggaagaagagtctcatatacgcagttatttaaagatccagaagatccgctatgaggatattttagactattccattcagatcgaaccgggaataaaggatcatattgttttaaaaatgctgctgcagcctttagttgaaaacgctctgtaccacgggatcaaaaataagcggggcggaggctgtattatcataagaggctatgaggaccgggataacctgatctttgaagtggaggataatggaagcggcatggatccggaaactcttgaaaaagtacgtaaaaagctttccggaacctttgaaggggaacaggcagatctgaaaaaaggcggctttggtcttaataatgtggcacagcgccttaggatgtattatggggatcaggcagagatactggttgagtctgaaaaagggatcgggacctgctttaagatcttcctcaataaaaaaacataactttttccaaagaaaacacaaaaatttgtggaaaacctataaaaaacacacttttttgaaaagatgctctgtataaaatatacggagcattttgtataataaaactgcaaaaacaaatgtgatgttattaaaaaggaggaaccatcatatgaaaaaaagatttttatccgtagcattagcagcagctgtagcaatgtcagcaaccgcatgcaccagcaatcctgcagagtcaaaaacaactgcagcgccagctgagacaaaggcagaggagaccacagcagcagaagcttcttctgaaggggaaaagaaggaagcagcagctgacggagatctgatcacagtcggatacgcacaggtaggcgctgagtctgactggagaactgcgaatacagaatcttttaagtccacatttacagaagaaaacggctataagctgatctttgatgacgcacagcagaaacaggaaaaccagatcaaagcgatccgttcctttatccagcaggatgttgattatatcgtagttgctcctgtagttgagaccggatgggaaactgttctggaagaagcaaaagaagctggaataccggttattctttctgaccgtcagatgcagctttcagatgacagcctttatgaagcatgggtaggcggaaacttcgtaaaagaaggcgagacctgtggtgactggctggcagattacttagagaaacagggcagagcagacgaagagatcaatatggtaaccattcagggaaccatcggtgcatctgcacaggttggccgtacagaaggtatggagaacaagttaaaagaacattccaactggaatatgttagacaagcagtccggtgaatttacacaggctaaaggacaggaagttatggagtccttcttaaagagctacgatgatattgacgtagttatctgtgagaatgataacgaagcattcggtgctatcgacgcgatcaaggcagcaggaaagacctgtggaccagagggtgacattatcgtagtaagttttgactctgtaaaggcagcatttgagtctatgatcgcaggtgacttaaacgcaaccttcgagtgcaacccacttcatggaccacgtgtagctgagatcatccagaaactggaaaagggcgaagaagttgaaaagatccagtatgtagatgaagcttactttgatacctccatggatctggaagagatcttaaagaccagagcatactaataaccagcaatctgttaccagtaatacatagcagatcaggcacggggcgggagacaaaagtcccctcccgtgtctttttttagaaaaaaggaggcatggcttttatggaaaaggattctgtccttgaaatgcggcatatatataagacattcccaggtgtaaaagctctgcagaatgtggattttacattaaaaaaaggggaaatacatgcacttatgggtgagaacggagccggaaaatccactctgatcaaggttctcaccggtgtggaggagtttgaaacaggagagatcatgatcgatggctgtgaccatacgatcatcaaccgcagtccgcaggaagcccagagccgcggtatcagtaccgtgtatcaggaagtaaacctctgccccaaccttacagtggcagaaaatctttttattggaagagagcccagaaaagcagggctgatcgactggaaaactatgaataaaagagctgcaaaattattgcaggatcttgacatacatgcagatgttacacagactattgacaattattccatcgccatccagcagatgatcgccattgcccgtgcagtggacatgtctgcaaaggttcttatcctggatgagcctacttcttccctggatgacggagaagtagaaaagctgtttaagctgatgttgcgtttaaaaggagagggagtgggcattatctttgttacccatttcctggagcaggtatatgcagtctgcgataagatcacagtactgcgtaacggacagctggtaggagaatttaccacagcagaacttccaagagtccagctggttgcaaagatgatgggtaaagattttgatgatctggctgccatcaaggaagcaaaggacgaagaggaacatacagaggaagatatcgttatcaaggcagtgggactgggaaagaaaggctatatcaagccatttgacctggtgatccacaaaggcgaggttgttggctttacaggcctgttaggttccggacgatctgaaacagtccgtgttctctacggggcagaacgtccggatgaaggaacccttcaggtaaagggaaatggaataacagccaaacacccaattacttccatgcatgcaggaatggcctatcttccggaagaccgtaaaaatgaaggtatcattgcagacctgtctgtaagagaaaatatgatcatggcacttcaggcaaaacgtggcatgttccacttattaagcagaaagcagcaggaagaatttacagataaatatattgaaatgctgcagatcaaaacagccagccgtgaaacaccgatcaaatcattatccggtggaaatcagcagaaggtgatcattggccgctggcttttgaccaatccggattttcttattctggacgagcctacaagaggtattgacgtaggaaccaaaacagagatccagaagctggtagtaaaactggcttcccagggaatggcagtggtatttatttcctcagagatcgaagagatgctccgtacctgtgaccgcatggtggttatgcgtgacggtgcaaaggtaggagaactttccggaaatgaaatgaaccagtcttccattatgtcaaccattgcaggagggcagtagtcatgaaaaataaaacattaaaaaacataacatcccagagattatttctccctattttctgcctggcactggtattgctggtaaatatcatcacaacaccgaacttcttttccattgagatccgtgatggcgttctctatggatatatgatcgatatcatcaaccgtgcctccgaacttgtgatcctggcagtaggaatgaccctggtagtatcttcctcagcaggaacggatatttccgtaggcgctattatggcagtaagtgcagctgtatgctgtaacatccttacaggtggagagagagcagctactgcttatgcaaatccactgatccttggctttatagcagctttggtagtaggcgcagccattggctgttttaacggatttttagtatcaaagttaaatatccagcctatggtggcaactctgatcatgtttacagcaggcagaggtattgcacagctgatcacagacggacagatcacctatgtgcgtgtagacagttaccgtgtactgggcgcttctttcccgggatttccggttcctaccccgtttatcgtggcagtgctggtagttgcccttacttcgctgcttttaaagaaaacagccctgggcatgtacatccagtctgtaggtatcaacaagagagcatcccagttagtaggtattaaatccgttcttatcattttccttacatatgcgtactgcggcctgtgttccggccttgcaggcctgatcgcttccagccgtatttattctgcagatgccaacaacattggtcttaacatggaactggatgccattctggcagttgccattggcggaaactccttaggcggcggaaaattttcactggcaggttccgtgatcggtgcatttaccatccaggcacttacaactaccctgtatgcaatgcatgtttcttctgaccaggtgcctgtttataaggctatcgtagttgttatcattgtagctctccagtctccaggttttgcaagatggagaaaatctctgttacagaagaaagagataaaagcaggaaaggaggcagcatgacatgaaaggtaaaatgaaattaaaacagaacagtttcctgctgcttgttaccattttgctgttctttattatgtacgggatcggctgtgtgctgtttaacgcacagggcttttccaagacacagaacttcttaaacctgtttatatccaatgcaggactgatcgttatcggtatcggcatgactgttgttatgatcaccggcggtattgatatcagcgttggttctttcgtggctatgggctgtatgatgcttgcctggatgatggaaaaaggcggtattggtgcagttcctgcagtgatcattgttctggtgacaggcattgtatttggcctggtccagggatttttagttgcctacatggacatccagccatttatcgtaacactggcaggtatgttctttgccagaggtatgactgccatcatttccaaagatatgatcagtattaccaatgagacctttatggcatgggcaaaaatgaagctgtatctgccatttggcggctacctgaacaaaaagggcgttatggtctatccttatatgtatcctaccgttgtgatcgccctggtatttctggtactggcatttatcatgttaaaatataccaagtttggacgcagcatttatgcagtaggcggaaatgagcagtcagccctgatgatgggcttaaatgtacgcagggtcaaattaaaagcctatgtattagacggtttcctctgcggcgttggaagtattttattctgcttaaacacactgggcggtttcgtagagcaggcaaagggctttgaaatggatgccattgcttcttccgttatcggtggaacccttcttaccggtggtgtgggaaatgtatttggaaccttatttggtgtactgatcaaggcaaccatcgaagcctttatcaccttccagggaaccttatcttcctggtggacacgtattaccattgcagctctgttatgcttcttcattgtactccagtctgttcttgccatgatgaagaaaaagaagtagaaaaaatagaaaaatgtagaaaaataaggagaagtttgctatgctgatgacggagaaaaaatataaattttggttttgcaccggttcacaggatctttacggagatgagtgtctggctcatgtagcgaaacattcacagatcatagtagaagagttgaataagagcggaagacttccatttgagcttgtatggaagccgactctgatcaccaatgaagtgatccggaagacatttaacgaagcaaatcaggatccggagtgcgcaggcgttatcacctggatgcatactttttcaccggctaaaagctggatcctgggattacaggaatatcacaagcctttatgccatctgcatacccagtttaaccaggagatcccttatgagtccattgatatggatttcatgaatgaaaaccagtctgcccacggcggaagagaatatggacatattgtgacccgtatggggattgaaagaaaagtgatcgtaggccactgggcagatgaaaaagtacaggatcagctggcttcctggatgcgtacagccatcggagtaatggagtcttcccatatccgtgtaatgcgtgttgccgataatatgcgcaacgtagcagttacagacggtgataaggtagaggcacagatcaaatttggctgggaagtagatgcttatcctgtaaatgagatcgtagaagcggtagacgctgtttcacaggcagatacagatgccctggtagaagaatattatgataaatatgacatcctcttagaaggcagggatgaaaaggaattccgccgtcatgtagctgtacaggcacagatcgagctgggctttgaacggttcttagatgccaacaattatcaggcgatcgtaacccattttggtgatctgggcggcttaaagcagcttccgggacttgcgatccagcgactgatggaaaaaggctatggatttggcgcagaaggtgactggaagacagcggcaatggtacgtctgatgaagatcatggcagcaggaacaaaggatgcaaagggaaccagcttctttgaagattatacatacaatctggtaaaaggaagagaaggtatccttcaggctcatatgttagaggtttgcccgaccatcgcagatggaaagatctccattaaagagtgcccgctttccatgggcaacagggaagatccggcccgtctggtatttactgcaaaggaaggacatggtattgcaacttcccttattgacctgggagaccgcttccgtctgatcatcaatgatgtggaagtaaagaaggcagaaaaaccaatgccgaaacttccggtagcaactgcattctggactccggagccatctcttgaaacaggggctgcagcatggatctatgcaggcggcgcgcaccatactgctttttcctatgacctgactgcagagcagatgggagactgggccaatgcaatgggaattgaaaccgtttatattgacaaagatacaaatatccgtcagctgcgcaatgaactgcgctggaatgaggcttattacaagttccactgatcaggaagaaagaaggagctatgggtcgcagtgtagaagaaataagaaatgacataacaaacgggggaacatctctggggatcgagtttggttctaccaggatcaaggcggtactggttgacagtaccaccgcccctgttgcacagggaagttacgagtgggaaaaccgcctggaaaacgggatctggacctattccctggaggatatctggaaaggcctgcgttcctgctatcaggatctggcagcagatgtaaaaaagcagtatggagtgggacttacacggatcggctctatgggtatcagtgccatgatgcacggatatatggcatttgatgaagcaggagaactgctggtgccatttagaacctggagaaataccattacaggggaagctgcaaagaaactgaccgaactgtttgattataatattccgcaaagatggagcattgcccatttataccaggcagtgttaaacaaagaagaacatctgtcaaagctggatttcttcaccactctggctggatatatccactggaagctgacaggaaagaaggttttaggcgtaggagatgcctcaggaatgttcccaatcgatccggcagatggccagtatgagaaagaaatggtccgcaagtttgaaacactgatggagccggaaggatattcctggaaattatccggtatcctgcctcaggtccttactgcaggagaagatgcgggaagtcttacagaagaaggagcagcccttttagatgaaagcggaatgattcaggcaggtatcccactttgtccgccagagggagacgcaggaactggtatgactgctacaaacagtgtagctgtccgtacaggaaatgtatctgccggtacttccgtatttgccatggtagtcctggaagagaacttaaagaaggtccatgaggagatcgaccttgtaactacacctgacggtcatctggtaggaatggtccactgcaacaactgtacttcggatctgaatgcctgggtaggactgtttgagcagttttatgagatgatgggccagaaagtggataaaaatactttatttggtaatctttacagaaaagccctggaaggggatgctgactgcggcggccttatgtcttatggttatctttccggagagccgatcacaggttttgaagaaggacgtcctctgtttatgagaaaaccggacagcaaactgacactggctaactttatgaggactcatttatacagttcccttgcaacccttaaatatggcatggacattatgtttaaagaagagaatgtgtctctggacaaattaatgggacacggcggtttctttaagacaaaaggtgttggacagcgcattatggctgcagcagcagatgtacctgttgctgttatggagacagcaggagagggcggcgcctggggcattgctcttttagcagcttacagaaaagataagaaagaaggggaaagcctttctgattatctgaaccagtatgtatttgcggatgccaaagaagaagtaatggagccggatgcagaggatgtagagggctttgacagctttatgaaggattatatcaaaggactggcagctgaaaagggcgcagtggaaggatggaaataaatgctggaagaattaaaacagaaagtatatgaagccaatatgcagcttccaaagtatggtctggtcacttttacctggggaaatgtttctgctattgacagggaaaagggactgtttgtgatcaagccttcaggggtagattacgataaaatgaaaccggaagatatggtggttatggacctggagggaaatcaggtagagggaaaattaaatccgtcttctgatacaaagacccatctggtactgtacaaccgttttccgatgatcggtggtatcgtacatacccacagtccatgggctacttcctgggcacaagccggaagagacatcccgtgttacggaaccacccatgcagattatatttacggggcagttccctgtgccagaaacctgacagaggaagaattaaaggattatgaaagaaatacaggagttctgatcgcggatctgtttgaagaaagaaaactggatccggtggcagttccctgtgttctgtgtaaaaatcatggtccttttacctggggaaaagatgcggcagaggcagtacacaatgcagtagtactggaagaagttgctaaaatggcagcccgctgtgagcgtttaaatccagacgtaaaagaagcgcctaagtgcctgcaggataaacattatctgcgcaagcatggcccgggcgcttattatggacagcggtaatgctataagaattatgatgcgtcagtcttcctcgtcgttgcagggaagaccgctgtgataagaataatttccaagttcgtccagtatccggtcaaaggatgctgggcgaatattattttcttccatcaaagtgttgatcatatagtagatggtggcatgttttgcaaggcactggcggaacagatccgggaaagaggtctgggaagcaatgctcttgtcccagggattgcaccaggtctcatggcgcaggttcaggctccatacagggtcttctaccacatcggttaccattttactggaagctaaaggatttcttaaaaacagggactctacgtattcgatccagttctttttctggctgtttgggtcggaaagtgtccggcagcccagacgcagggcaaggatagaacggtggatcattcccggggatacctgataatgatttttgctgcttaaaggatagaaggcgtcatttaagcaggaggagaggaaacgagagataaactgtgtttccatgccgtttaaacagatggtagccgcctggttgaactgggacggctttttctttttgtatttcatcaataacagggcatcaatgtcattttccagcctggcatgtaagccgtgacaggcggctgttggatgctccgcgtcatagtggatgcggccatatacataagggtggcagatagagtcgccaatataatggctgatgaaaccgcataagaaagcaaggccttcctcacgctgctgccgggactcaatttttgaaagacgggtgaatgcgcagcggaaaaagtcatttacatggtgttcatgcatataggagcctacgttgcggtgatccctgtggcgcaaaacaggcagattataaaaaaacatatccggtccctgaagaccaagctggtagagccagcggtattttgcaatgatgaattttaagttgttctgaggcatgtcattgtatgccttcataccgagaatgtagtgggtggtgaagccgggcatggttgtggggcctcctttcgggtgttgatggcgttgtggggccacgcaggttcctgcgctctttacattataccatatttttgtggataaagcaggcatagaagggaaaaacagtgcataaaaacctcataagaaggttgcagtgaggcataaataaggcgcatatgaaagttctggaaatggtgcatgggatcatatgggggccgtggacggtgggggtgtttctggttgtgggactggtgttatcggtgcgctgccgtttctttcagatccggggatttcgatattggtggaaggcaactgccggaagcttatggggagaggaacgtgagggcgatgaaagtacaggtgctgccggggcccaccatggaattacacagttccagtcggtctgtaccgcccttgcagcaacggtggggaccggtaatattgcaggtgtggcagccgctcttgtatccggtggtccgggagccgtgttctggatgtggatctccgcactgatcggtatggccactgcttatggggaaacctatctgggagtccggtaccgttttaagaacaacaggggaaaatggatctgcggcccctttgtctatatgaaaaaagggctgggtatcccttttatggcagcatgttacagctttttctgctttctgtgtgcccttggaatgggaagtatggtacaggcaaattcagcagcagagacattggaatttacctggggaatcccgtcggtgttaggaagcggtattctggcgctgcttacgggagccgttatcttaggtgggataaaacggatcggcaaagcagcagaatacctgttgcctctggcttccgggatctatattttattttccctgctggtacttttattatgcgcagaccgtataccagatgcatttttaaggatctttcagtctgcttttgggatccggcaggtttcaggcggcatagcgggctttggcatcagtaaaagtatccgttatggtatatccagaggcgttttttccaatgaggcagggcttggcactttggcagtccttcatggaccggcagaacatacaacaccagaagaacagggaatgtgggctatgtttgaggtgttttttgatacggtagttttgtgcagccttacagcactggtcatcttgtgtaccacacagggagatacggaaacactttctcttacaggagcggccctggctgctgcctgtttttctgcaaaactgggagtcataggaaaatggtttatcagtatttccatggtggtatttgcttttgccactgtgatcgcatggtattacctgggacagcaggcaatagaagatctgtctcttttttccaggatctatccggtcttatttttaggagcagtatttgcaggaggctgtatcaggctggaagcagtatggatgctgtcggatctgtggaatggactgatggcattttttaatctgacggctcttttatttttaacaggggaagttgaatatccggatcggtatatttaggaagagcagactagaaaaagcacctcgttttgaggtgccttttccggaaaaaagtattattaaaagggaggagagctgataaaatcttaccagctcgagtattatgaaaaaaatcttgtaagcttagttaggtattaaaaattttcaggagatgaggtttttgtttgttttctctgtctctcatctatgactaaagtataaaaagaaaagatgaagaaatcgtgttcattgtgtaacacttttttgaatgatttatgaacgaaatgtgaatgatacaagtgtcaaaagcacgtagcaatttggtatcataaatgagaatttcaggagcgttgacaacgttacctgattagcctataatttgtccaaaagaaaaacaagtggcgcagtatgaatgttaaatcccgaatgataaaggagtttttcacaaatgaccttaatgcagatgaaatatgccattgcagtggcagataccaaatccatgaacgaagcggcccgcagcctgtttatcacccagcccagcctttccgcatctattaaagagctggaaaatgagatcggcgtggagctttttaagcgtaccaaccgtggtattactgtgacaccggaaggggaggaatttttaggctatgccagacaggtggtggaacagtaccgcctgatcgagtccaagtacattgaaaaagaaaatgtgcgcaagaagttcagtgtgtccatgcagcattattcctttgctgtccaggcctttgtggaaatggtgcgccagtttggaatggacaagtatgaatttgcagttcatgagaccaagacctacgaagtgatcgaagatgtgaagaactttaaaagtgagatcggcattttatatcttaatgattttaacagcaaggtgctgacaaagctgtttacagagttcgggctggaatttcacaggcttctggattgcgggatctatgcctatatgtggaagggaaatccactggcatccagagagtctgttactatggatgatctgcagccgtacccatgtctggcgtttgagcagggaaacaataattccttctattttgcagaagaagtcctttctacttatgaatataagcagctgatccgtgccaatgaccgtgcaaccatgttaaacctgatgaaaggcttaaatggctatactctttgctccggtattatctgtgaggaattaaatggcggtgattactgtgcagtgccattggagtctgacgaagtgatgactattgggtatctgtgccgcaagggagtagccatcagtcctttaggccagaaatatctggatgagatacggaaatataagaatgaagatgcccgctataggtaaaaactataacgggttcttttttttgtgtattagacagatggaaaaagtagtgttattatttgtccataaacaaaaacaaacaaaaacagtaggtaaatgactgatatatttttaatccaggaggacaataacatgggaaagaaatcttacgatgaaagaaactttaaatttgagacattacagcttcatgtaggacaggagcagccagacccggtaaccgatgcaagagccgtaccgatctaccagacctcttcctatgtattccgcaactgcgatcatgcagcagcaagatttggactgagcgatgcaggaaatatttacggacgtctgaccaacccaacagaagatgtatttgaaaagagaattgcagccttagagggtggcgttgcagctttagcagtagcttccggtgcagcagctatcgcatatactttccagaacctggcacatgcaggtgaccacattgtagcagctgagaatatttacggcggaacttacaacctgtttgcccacactcttccagagtacggcatcaagaccactttcgtagatccatttaactacgagcaggttgaggcagccatccaggaaaacaccaaggcgatccacgtagagactctgggaaatcctaactctgatgtagttgatattgaaagactggcacagatcgcacatgcacataagatcccgttagtagttgacaatacattcgcaaccccatatctggttcgcccaattgaatacggtgctgacatcgttgtacattccgcaactaagttcattggcggacatggaaccaccatcggcggtgtgatcgtagacagcggtaagtttgactgggaagcaagcggtaagttcccgtccttagttgagccaaacccaagctaccatggagtaagctttgtaaaggcagtaggaccggcagcatttgttactaagatccgcgctatcttacttcgtgataccggtgcaactttatccccattccatgcattcttcttcctgcagggactggaaacactgtctcttcgtgtagagcgtcatgtagagaatgcactgaaggtagttcagtacttaaacaaccatccacaggtagaaaaggttcatcatccatctgtatcaactgatccagagcagcagaaactgtacaagaagtacttcccaaatggcggcggttctatcttcacctttgagatcaagggcgatgcacagaaggcaaaggacttcatcgacaacctggaactgttctccttacttgcaaacgtagcagatgttaagtctctggttatccatccagcttctactactcatgcacagctgacagaagaagagctgaaagagcagggcatctacccgaacaccatccgtctttctatcggtactgagaacattgacgatatcatcgaagatctggatgaggcatttaaggcagtagctgagtaaaacagtatacatagcatggcaagtgaatgaaatcgtataaaataggtaagtgatatataaaaacaggcgtatttttccgtaacaggaagatgcgcctgttttgtgtgtactaggaaattccgttggaactccctggtatacaccgaggcacattcttttacaggtctgggaagtcagacggatatatggtaaaatgaggtttaagaaagagtttaagagcaaataaaccagaaggagggccttatgaaccaacagcagcttattttcatcagggagatcgcacggactggtacgatccggggggcagcggcctgtgtggacaggacgccttctgcccttaccaggggacttaaaagtgtggaaaatgaactgggctgtcagctgtttcgcaggatacgggaaggaatggtccctacttccgagggagaaaccgtgctttcttatggggagaggatcttaaaaagcctgcaggaaataaaggaaaaacggatctggtcggaaaatgagatccgttatcttttatgtatccgggaaaataagagtattaccggggcagcggaaactctttttattgcccagccttccttaagccaggtcttaaaagaagtggaagaggaagtgggatttaagatctttcagagagaccggaggggggcagaggagacaaaagcgggcgcagagcttttagaacagttagaggaagtatggaaactctggaaggaaatgcgggaagaactgggagaataccgggaactgaaaaaaggaacagtaaccatcggcatccctatgaacctgggggcctgtatcctgcctgtagtggttcctgtgtttcgcaggcgctatccgggggtaaaggtatttatccgtgaaaataattcccaggaactggaaaaaatgatgctgtctcataaagtggacttctgcattatgcattttcagaaagcattggatgaagtatgttatgatgaattttctgaggatcctttttatcttgcagtgccggaaatttttcagtcacaggtatcgctgtcagaggaaaagccgttaaaggtagaagatataaggcagctgaaaaagatcccctttgttatggtggcaagcagacagaaactgcgccaggtggcagatgagatcttaagaaaagccgggatccggccggatatctgctgcactacaaagagcatggaaacagccaaacgtctggcggcagggggaatgggagctacttttctgccaaagtcttatatgacgctgtattcggggacagagggattaagctgttatccgctggatgaagaactgggagcgtcctggaagctggtagctgcttatcctgctgatgagaaaatttcaagggcttccagggaatttttgcgtacattaaaagagtgtctggaataaggaaatataaagaaaattctgaaaaatagtgttacattttacctatataaaaactggtatgtaatgtattttacctattactgtttttgtattaatataaaaataagaaagtgaaaaaagtaacatacacatacaaccatttaaaatcaatttaagatcatttcaaagaaagaaaaggagaaggaaaaatgagcgctatttcacaggcacaggaaaaatttggggaactgatccagtctgagtttgaacggatcgaacgtatgaaacaggatacggaagtaaaagatttttcaaagctggataagatcgttgtaggcatccttccaggagacggtattggtccgatcattatggagcaggcagttcgcgtgatcaaggcactgattccggatgagatcgcttccggcaaagtagaactgcgccatattgaaggcatgaccattgagaacagagctgcaaagcttcagagcctgccagatgatgtatttgaagagatcaaaaaatgtgatgttatcatcaaaggaccgatggtaactccaagagccggtgagccatggccaaacctggtatctgctaacagcctgctgcgtcgcggcctggagctgtttgctgctgtccgtccgatccgtatcccggacaagggcattgactggactttcttcagagagaatattgaaggtgaatatatctggggaaataagggtatccaggtagatgaagatctggcagtagactttaaggtacagaccaagcagggaagtgaacgtattgcaagagctgcttttgagtttgcaagaaaaaatggtaagaagaacgtaaccattgtaacaaaggcaaatattgtaaagctggctgatggaaactttatcaaggcagtgcgcaaggtaggcgaggaatatccggagatcgagatccaggagcgtttagtagatgctatgtgcgctaaaatgctggatcctgagtttaacaagggtattgaagtagtagtacttccaaacctgtacggcgatattgtaacagatattgcagcagagcatcagggcggtctgggaactgcttcttcttctaatatcggtaataaatatgccatgttcgaggcaatccacggaactgctccatatctgatgagccacggcagaggcgagtacgcagatccaagctccctgatccgtgcagctggcatgatgttagctcatattggctatgcagacaagaaggttcttctggaaaaggcactggatgtatgtaccacagagaagaaagtggtactgactacttttacagaggatgcaagtgcaaaagaatataccgattatattattgagaccattgaaaagctgaaatagaggcaggaaacatgagaaaatttaaaactgtctttatgcgtgggggcaccagcaaaggctgtatgttccataaagaagaccttccggaagacagaaaagaatgggataacatttttttacagtgcatgggagacccggatccaaagcagatcgacggtcttggcggtactgtatcttccaacaataagatcgttattgtatggaaaagtaaagaaccaggtgtagatgtagaatatctggtaggccaggtcattgtaggtaagagtcaggtggattataagtccaactgtggaaatatgacagcagcagtaggaccttatgcagtagaagaaggtatggtagatattgtagagccgatcaccactgttcgtatgctaaaccgtaacacagataaatatatcaatgtaaccgttccgatcgatcctgaaaccaagacatttgcccaggagggtgactgcgctattgcaggtgtagacggaacagcagctgaattgaaggtcaatttcttaaatccggccggtgcaaagacaggaaagctgcttccaacaggaaatccaaaggacgtgctggatattccgggatttggaccgattgaggcgaccattctggatgtgtctaacccaatggtcctggtgcgtgcagaggatatcggtcttacaggccgtgaactgccggaagaggtaaacagcaacaaggcagccagtgaaatattggagaagatccgcggtgcagcttgctgcaaaatgggctttgcaaaggatttagaagatgcaacttctaacagccctgcagtgccaaaagtaggatttttcacaaagccacagagctatgtggatattgcaggacagcaggtaaatgcagaggatatggacgtttgcgcccgtgtgatctctgtatttaagtgccacaaggcatgccctctgacttcagccagctcaatttccgtagcagctttcttaaaaggaagtctgctgtatgaagagcttggaaagccggaagaaggaaagaccaatgtgcgcatcggccatccaagcggtgttatgaccatgtatccggacctgaaagaggagaatggagaattagttcttcctggtgttgcagtacagagaactgcaagaaggatcatggatggaatggtctatgtgagaaaatagcaaacagcctgcgtcagcaggcaatagagcgcgacagcgcgggtttgcgagtctaagatcaaaggattttgcagtccggtgggatgtttcccactggcgcagagtcctttttttgtaagctgcataccatggtaataagtatgaaatacaggagcttttatatgcctgaagcttatattgcattaacaccggtccactggttttacctggtgggggtgttggtgatcttatttaccatgatattgcgaaaagatacgccattggtctgcattgcctttctttttggaattggcgttgttggaaaatgcagtctggcaggaggaatacagaccattttcagttccattatctatgctatcagtgaatttcgcgaggtgatcgctaccattgccctggtaacggcattttcaaaatgtttacgggaattgggaagcgatgcccttcttatgaagccggtgtcaaaagttatgaggactcctgctgtttcctggtggatcttaggtggcatcatgtttgtattttccctgtttttgtggccatctccggcagtggcactggtaggtgctattgtacttccaattgctgtgcagtccggattaacaccgcttgcagcagccatggcaatgaatttgttcggccatggttttgccctcagctatgatgcagtgatccagggggcaccggccatttccgcgggagcggcagatatttccacaaccgatattttaagcaagggccggccactgttctggatcatgggtattacctgtgtatgcagcgcgtttttgctcaaccggatgacattggcaggacagagaaaaaatgaagatcagaggaacgatctgaaaataacggatctgcctgaaaagcaggaagacagtggagaagagactccggaagaaaagggggataggaagaagcaatattccaccactgctaaggctctggcggttcttactcccattgcttttcttatggatatcctgtttatgttcttattcaaattaaagggcggagatgccaccagcctggttgcggggactgcagttattcttatgtgtgtgggcgcggtcatggagtttaaggccggttctcttgaaaaggtgacggaatacgtaacagatggatttttatttgccatccgcatttttgctccggtcattgtgatcggtgcctttttcttcctgggaggcaatggtattacccatattttgggagactcctatgagcgtggaattttaaatgactgggcgctatggctggcccatcatgctcctttaaacaggtatatgacagccttattgcagctggtgatcggtggtcttacaggactggatggctccggcttttccgggcttcctcttacaggtgccctggcgaggacctttggcacagctacaggcgcttccattccggtcctggcatgtctgggacagatcagtgctatttttatcggtggcggaacggtagtgccatggggactgataccggtggcagctatctgtaatgtagatccggtggaactggcaaggaaaaatatgctgccggtatttattggcctgacatgcacttttctggtggcgtgtcttgtgttgtaaggttccgcctgcgcaagcaggcagtagggcgcgatagcgtgtgaacctgagtttaagaggaggttatcatatgtgcgggatcgccggattttatcagagtcattttgactatctcacagaggaagatcactaccgtcagatactggaagatatggaaaaagtgcagaagcatcgtgggccggatgaacagggaaattatctggactctcattttgggttagcccatgtgagactgtcggtgcgggatctggtttccggccgtcagccaatccttaaaaaaacaggagataagacctttgggatcgtatacaacggggaactgtataataccacagagttgaaagaagatttactgaaaaaaggctgggagttttccactaccggcgacacagaagtggtccttacaggatatatggaatacggtccggattttgtaaagcagatgaacggcatattcgctttcgggatcatggacccggtaaaagactgcctggtgctgttccgtgaccgtctgggagtaaagccattattttatacctgttttcatgaccaggtcattttttcctctgagatcaagggacttttcgcatatccgggtgttacgccaaaactggataaaaagggtttaaacgagatattcagcatcgggcctgcgaaaacctatggatgcggcgttttcaaggacatagaagaactccttccggcccactatcttgtatgcaatgcagcaggtctgcatacagaatgttactggaaattagagagtaagcctcatacggacagttacgagcaaacggtagaaaagacggcatttctggtccgggatgccatctgccgccagatcatttccgatgttcctgtgtgtacctttttgtccggtggtgtggacagcagcctggtatcagcagtgtgcagcgcagaactgaagaagaaaaataaacagctgactaccttttcttttgattttaaggataaccacaaatattttactgccaatgccttccagccgtctatggaccggccttttgtggacattatggtgaaatatttaggttcagatcatcattatctggaatgtgacaatgtgacccaggcggatctgctttatacgtctgtagaagccagagatctgcctgccatggcagatgtagactcatctttgttgtatttctgctcccaggtcagccgtacccacaaggtggctctgaccggggaatgtgcagatgagatatttgggggctatccatggtttcacaaaaaagagtgctttgaggcgaaaacatttccatggactatggatctttcagccagaaaggtgctgctttctgatgatttcatccaggaacttcacatggatgaatatgtgcaggcaacttatgaaaagtcagtagcagaaacacccagactggcagaggatacaccagaagaagcccgccgccgtgagatcgcgtggctgaacctgagatggtttatgcagacattattagaccgtatggaccgtaccagcatgcattccggactggaagcaagagtgccttttgcagaccaccgcattgtagaatatctgtggaatgtgccatggtacatgaaaacaagggatggggtggcaaaacatctgctaagagagtctggaaaaggtctgctgccggatgaagtgctgtggcgcagaaaatccccgtatccaaagacctatgacagagcttatgaggcgctgctggtgggccgggtgcgtgagattttagaagacaatacctcacctgtattgcagtttctggataaggccaaaacagagaaattcctggaaagcccctcagattatggaaagccatggtatggtcagctgatggcggggccgcagatgctggcttatatgatacaggtggattattggttgaagaagtataatattgagatcgtgtgatagcatcccgcccttgtgggcgggagcgttgcatattggcaggtacaggaatgagaggagaaaaattccggatgtactatttgtcattaggttcctgggcaaatgtctgccgtaccagatccaggaaatactgatccgctctggacaaaaatccgccctttaaggtggcaatactcagatcccagctggggctgtaggactcatcaatggataataacaccggcggatggtctgcataggtcagggcggcgtaatccataggcagaaaggtaatgccaatgccctgaccggccagacgctgggctgtctcgtaattctttattgtcagcacgatatttggcgtaatctttgcttttgccagtatggcgtccgatacatgacggatgcgctgctgggaatggagcaggatcaaaggttcatttttcaataaacgtacatctaaaaccgggaagagatatcccggttttttttgcgccttttcgatcaggggatgtccggcagcaagtgctatgacaaaaggatcctctgagagaaattcataatttaataaaggatttggagccagcttcggggcatggagaagagcaaaatccatagcgccggtaagaagttttgcttccagatttcccgtattgtcctccaggatctccagttcaacagaagggctgttttccttaaattccagcagtatttcagggaggatgacagttcctaaatggttggtagtccccattacgatacgtccggtttttaactggttgatgtcgctgatctctgcttcaaaatcactgtagatcttaagaacctggcaggccatctgatagcagcgctctcctgcataggtcagtgtcaggccggaaggcgtcctgttaaaaagttttgcccccagattttcctcgatcctctgtaaagactggcttagggacggctgggcgatgtaaagttttctggcagcagaggagatgcttttttcatctgctactgtttttatgtattctaattcacggctggtcatgggggagcctccttgtatgtacttggtgttatacttgcgaacgtgcgtttacacgatctattgcctgctgacgcaggcggttcgccaacacataggtaaaaatgtatatctgttattatatatatagtatttgcctataaaagtaaagaggtgtatagttaattcagaaacaaaaagaaacaaacttaagaagcagataataaaagaccagctcctccgggagaggatggtcaataaccattcaagaacagaaaaggagaagaaacattatggtaaagttatatgatgagggcatctaccttgtaaacggcaccgagatcgtaccggagtctgaggcagcaaaagtacaggctcttacaggaaaagcagcaaataaagaagaagcaaagaaaggcacaatggcctgttccattttaagtgcccacaacacttcaggagatatggagcacttaaaacttaaattcgatgcaatggcatcccatgatatcacattcgttggtatcgtccagacagcaaaggcatccggaatggaaaaattcccactgccatatgtactgaccaactgccacaactccctttgtgcagtaggcggaaccatcaacgaagatgaccacatgtttggtctttctgcagcaaagaagtatggcggcatctatgttccacctcacattgcagttatccatcagtacatgcgtgaaatgcatgcaggctgcggacgcatgatcttaggttctgactcccacacccgctacggtgcattaggaaccatggctatcggtgaaggcggcggcgagctggtaaaacagctgttatgtgatacatacgatgttgcttatccaggcgttgttgcaatttaccttacaggaaagccaggacctggcatcggacctcaggacgtggcactttctattatcggcgcagtattcaagaagggttatgtaaagaataaagtaatggaatttgtaggacctggtgttgcttctatgacaaccgactacagaaatggtgtagatgttatgacaacagaaactacctgcttaacatctatctggcgcactgatgaagatacaaaggcatttttaactgctcatggcagaggagatgcttacaaggaattaaatccggcagatgtagcttactatgatggctgtgtttacgtagatttaagcaccatcaagccaatgatcgcccttccgttccatccaagcaatacatatgagattgatgagttaaatgcaaacctgggcgatatcttaagaagcgtagagaaagaagctgagaaagtcagcggcggaagagctccatttacactgactgataagatcgaaaacggacgtttaagagtacagcagggaattatcgctggctgtgcaggcggtaatttcaccaacgtagtagaagcagcacatgcattaaaggaaaagagttgcggcgatggcgaattctcactggctgtatatccttcttcccagcctgtatttatcgacctggtaagaaagggcctgatcgcagatctgatggaagcaggcgctatcatcagaaccgcattctgcggaccatgcttcggcgccggtgatacaccttgcaacaatggcttaagtatccgtcatacaaccagaaacttcccgaaccgggaaggcagcaagccaggaaacggccagatgtcagcagtagcattaatggatgcacgttctatcgcagcaactgcagcaaacggcggtatccttacaccagctaccgacttagactgctggggcgatgttcctgaatacaactttgataagactgtttatgaccgccgtgtatacaatggttacagagcacctcatgaggaggacagcctggtatatggtccaaatatcaaggactggccggaaatgagcccattaactgacaatatcctcttaaaggtatgctccaagatcatggacgaagtaaccacgaccgatgagctgatcccatctggtgagacctcttcctatcgttccaacccattaggactggctgagtttacattatccagaagagatcctgaatatgtaggaaagagcaaggcagtggataagttagagaaggcaagaaccgcaggccagaagccatctgagttagatgcagatctgaatggagtatttgatgccatccataccatttccggtcaggaaaatgtaaatgaaatggaaacagagatcggaagtatgatctatgctgtaaaacctggtgatggttctgcaagagagcaggctgcaagctgccagagagtcatcggcggacttgcaaacatcacaaaggaatacgcaaccaagcgttatcgttctaatgtaatgaactggggcatgatcccattccagatggtagaagagcctgagtttgaagtgggcgactacatctacgttccaggtgcaaaagcagcactggatggtgatttaaaagacattaaggcttatgtgatcaatgcagataccaaggcagtaaaagaaatcagtctgtatgttgcagatatgactgcagatgaaagaaagatcgtaaaagcaggctgtctgatcaattataaccgtgcaagaaaaggcttaaagtgatataatgtaatgagcgcgatagcgcgggttcgtgagtttaaagataaacacagtgccacatattttcctgattcaaaatgatctggaaaatgtgtggcagtacccgtttgaaaatgattatttcacagatgcggggggtaacaaaaagatgttaaaaagacatcgttaaaaacaggaggaaataaagatggagattaagaaaccggccatggcaggaaccttggaatccagtgactgtcaggtaaccgtagaaccgggaaatggttctgtggaatttagcctggaaagtgctgtgatcaatcagtatggcaaccagatccgcaaggtagtccttcagacacttgaaaacctggatgtaaaggatgtaaaaatctcagtggtggataagggcgcgctggactgcaccattaaagcaagggtagaaggtgcggtattccgttccgcagaccagatcaaggacattccgtggggaggtgcaataagatgatcaatgcaaataagaagcgtttaagaaggaccatgatgttcttaaatgcacagaaaccaggcctgatcaaggatccatatatttataaaccagattccattatgctggatttggaggacgctgttgctgaaaaccagaaggatgcagcacgtttctccttatatcatgcattaaaagagatcaattacagaggctgcgagagagtagtccgtatcaatggccttgacaccccatactgggaagaagatatccactgttcagtagcaggcggctgtgatgccatccgtatccctaagacagaaagcgcactggatgtacagagagtagaagctgtagtagaagagtgcgaaaagaagtacggtatcccggaaggccacacactgatcatggcagccatcgagtctgcaagaggtgttatgaaagccttggatatctgcgaagcatctgagagactgtttggtatcgctctttccggtggtgactatacaaaggacttacagacacacattaccggtaccggtctggagctgatgggtgcacgccagaacatgatcatcgcagcccgtgcagctggtgtacagtgttttgatactgtatacaccaacctggatgatatggaaggtttccgtcacgacgtagagaccatccatttaatgggatttgatggaaaatccattatcaacccacgtcagatcaacatcgtacatgagatcttcacaccaacccagaaggacatcattttcgctgagaaagtagttaaagagatcgatgaaaagaagaaactgggtatcggtgtattcactgtagacggcaagatgatcgatatcgcattctatgacggcgcaaagaggaccatcgagcttgccaaggcatcaggcgtatataagggggatctgtaaaatgataaacgcagtaggaagagatataccagaagagatcctggagatgaccggtaaagaggtattccagggaaatcattacagggacggatatgtatacaaaaaggacggcccatatacaaaatgtgtggtaaacaatacacagagcaagctggttgccaacatccatgatgtgctgataaaatgcggcatcaaggacggcatgaccttaggcttccatcatcatttccgtgatggtgactatatcgtaaatatggtcatggaagaagttcataagatgggcatcaaggatatcacaatctgcgcaagttctttaggaaaagctcatgacccgattgttccttatatcgaagacggaaccattaccaatatccagtcctccggtgttcgcggtaagatcggtgaagcaatctccgcaggtaaattaaagggacttgcaatcatgcgttcccacggtggccgtgtaagagcgatcgagagtggtgagaccagaattgacatcgcatttatcggaaccccaacctgtgacgattacggcaactgccgtggtatcggcggcaagagtgactgtggcgtgctttcctacgctatggtggatggtgactatgcagataaggtagtagcaattactgactgcctggtaccattccctaacttcccggcacatatttccatgaccaaggttgactatgtggtagtagtagacgctatcggtgatccaaagaagatcgctaccggtgcagcaaagccaactaccgatatgagaaagctgatgatggctgactactgtacccagttcgtagtaaacagcccatatttcaaggacggattctcttaccagaccggtgtaggcggtgcatctatcgcatctactatctctctggctaagatcatgaaggaaagaaatatccgcatgcgttttggcgtaggcggtctgacaaagccaatgtgcgacctgctgatcaacaaccaggtagactgcctgttagatacacaggactttgacctggcagcagtagagtctgtaaagaacttaaagcatttccgtatttctgccggtgagtacgcagacccatttaacaagggtgctgttgtaaataagctggattttgtaatcctggctgcactggaagtagacgtaaactttaactgtaacgtagttgtaggttctgacggtgtcattaccggtgcacagggcggacatcctgatacagcagcaggagctaagtgtactatcgtaatcgctccactgcttcagggaaggatcccggctatctgcagcgaggtaaccacagtaaccactcctggagagagcattgacgtagttatcactgattacggtattgccatcaacccaagaagacaggatctgatcgaggcaatgaagggtgtagacctgccatttaagaccattgaagaactgcgtgacattgcatattctatcgtaggcgaaccggagaaggttcagtttggagacagagttgtaggtatcatcgaagcccgcgatggcacgatcatggacgttgtacgccagatcaagccatatgagtttgctgactaagcaaaccaaaaacaagcggctgcgcagcagacatttgtttttggtgcgtgtcagcaacgaacaaaccgcctgcgtaagcaggcagtggagcgcgtaagcgcgggtttgtgagtctgcaaaatttataagtctgaaaaacaaagtccatgccgctgccgcactggcagcctgcatggacttttttctacttcaatttccacttcaaaagcaatgctgaattggtaataaccaatacagatcctgcattatgcaccagcgctcccacaaccggatttaactttcctgtaatagccaatgtgatagccaggaaattcagtgccatggaaaaagtcatattgaccttaatggtagtcatcatgcgcttggaaagagctaccagatgagggatttcttttacctcgtcatccaccagcgcaatatctgctgcatctaccgcaatatcacttcccacaccgcccatggcaataccaacatcggcagcttttaaagcaggagcgtcgttaactccgtccccgatcatacataccagttcctttttctcctggcaggaacggataaagttcagtttatcttccgggagacagtttgcctgtacttctttgatatgcagctgtccggcaatagaagcggctgcattttcatggtctcctgtaagaaggaccggttctacattcagactgtgaagccggctgatcatagaggcactttccacacgcacagtatcagaaagagccaggaaaccagccagaatgccgtcaaaagccacatagatcacagtacagccctgggccaggaagccttctgctttttctgtaatatcctgattgaaagagatcctattttcagccatcatttccatatttccagccagtatcattttgccttctactgaagcagaaacaccacggccggggatcatatggaaatcatccactgcagggacagcgccgtattcctgcttaaaacagccaagaaccgcttttccaagaggatgttccgagtgctgttctgctccggcacagaagcggtaaatatcttcactggagtagcctggatgagcgctgcaggcggtaactacctttggagtgccgcaggttaaagtacctgttttatcaaaggtgatcttagaaacttttgccagtttttccagcgcgtccccttcacgtaccaaaaatccgtgctttgtggcatttccaatggcagccataatggcagtaggagtggccaggatcagagcgcaggggcagaaaacaaccagaatagtaacggctcggatgatctgaccggtaaacagccaggtaagagcagcagcgcttaatgcaattaccacgatccaggttgcaaaacggtcagccagaccaacgatctttgcctttcctgcatctgctgactgcaccagacggatcatgcgctgaatggagctgtcttcaccaaccttagtagccttcatttcaaaggtaccaaactggttcactgtaccggaagaaacatcatccccaatggtcttgtctaccggaagagactccccggtcataacagcctggtttaccgatgtatttcctgaaaggatcacaccgtctacaggaatggtctcaccgggaaggacacggagaatatcgtctacagctacatccgttgcggcaattatggtttctgtgccatccttgaccagttttgcagtctggggtgtcaggcgcaccagcttttcaattccggcccgggctttagcaacagtcagttcctctaacaaagcacctaactgcatgataaatgccacttcaccagccgcgaaattttctccgataaagacagaggcgatcagtgccagagatacaaggacatcggctttgatgtcaaattctgtgatcagaccaatgacagcttccatgataatgggaataccacacagaataatggcaacccaggctgcgtcaaatggcagcgggatcagtttaaaaatactgatgatcagtgcaataccggaaatgaccaggaaacagatgtctttctttataccgccgatctccataagagcttccagctttttaacagactctttcataatggatccttctttctgcattattgcaaatgttatgtgagaatgcatatgacttttatacctatgggggtatacctaacatatctgcattatacctataggggtatatgttgtcaagaagcaattataaaaggatccaaagagtaaggctcttttttgcacacaaaaaagccagccctgaatggactgactttggatattagtatatgatgttagattgcgttgaattttcaatctttgagcactgatgtcattgcatgttggcaaagcgctccactgcctttgtaaagctttcaatggtcttatctgcgtcaccatgttcgatgccgtcccggacgcagtgtttaatgtggccttccaataccactttaccgcagccgtttaaagcggattttgcagcattgatctgggaaaggatctcttcgcagggaatatcttcatcgatcatacggtcaatagcctggacctgtccgatgatcttttttaaacgtctgtgcagattatctgaatccatgcactgtctcatagtatttttacctccttatccgcggatgaacctttggagtataagtaagtgtaaccaaattttggcggtttgtcaatgaagggaagaattgacaggaagtgttgtttcagagtaaacttgcaggagatgcattttactatgaaggctggcggtagctgtgagaacgctgactgtaaggagcagccagctttcaggttttgaaagagcgaggaagacagaatatgaaacgatcactagaactagcagaaaagctgatccaccagagttatctggaaaaagaagaatatatggaattattaggcagttatcaggataaggaaactgtggtttgtctggggcaggaggcagcgagacttcgtgaaaaatattatggaaataaagtatacatgcgtggtcttatcgaatttaccaatttctgtaaaaacaactgctattactgcggtatccgccgggataataaaaacgccagccgttatcgtcttacagaagaagagattttagactgctgcaaaaatggatatgaactgggctttcgtacctttgtactccagggaggagaagatccttattttacagatgaaaagattgtggatatcgttaagaagatccgtaacagttatccagactgtgccatcactctttctattggagaaaaaaccaaggaaagctaccgcctttacaaagaagcaggagcagaccggtatctgctgcgtcatgaaactgcaaatgaagaccattaccgccatctacatccggaacagatgagtcttgcgaacaggaagcagtgtctgcggaatttaaaagaattgggctatcagaccggtgccggttttatggtaggtgcgccgggacagacgctggagtgcctggcagaggacctgatctttttaaaagaattaaatccggaaatggtggggatcggcccatttatcccccatcatgataccaaatttgctgatgagcctgcaggaagcgtggaattgacgctgtttttattatcggttcttcgtatcatccttccaaaatgtctgcttccggcaacaacagctcttggaactgcagatccaaagggaagagaaaagggactgctggcaggtgcaaacgtagtaatgcctaatttatcccctgtaaaggaccgcaagaaatatgaactgtatgacaataaaatctgtaccggtgatgaagcggctgagtgcagagtctgtcttaagaaccgggtgaaatctgtaggatttgagctggtggaagacagaggagatgtggcgttatagtgttcatgccgcaaaagatggaaaagtatgttatgaattcagtaggaggaaattaatataatgggacatttttattttgtaagacatggacagactgtatggaatgtggaaggaaagatctgtggggcaacggatattgcactgacacagcttggtcatgaacaggcaatagaaacaggaaagaagatattagaagagcatatccaggcagacgagattctgtattcccctttgatgcgggctgcagatacagcaaaacacatttctgagatcacaggcattccggtccgtgaagaattacggttaaaggagcagaattttggtatatgggagtcaacaccaagaggtggtgaagactttaagaaggccaaacagtcctttgcatgcagctatgaaaccggtgagtctatgcttcgtctggcacagagaatttataatcttttagatgagatcaagagtcagtcagataagaaaacatatatcctggtagctcacaatggcattgcccgagtggtgcagtcctatttccatgatatgacaaatgaagaatttgcagcttatgggatcaaaaactgtgagataaaaagatatgatttttaaatcaggaaacgcgtcacgggcgcattctccatattttcaatatgtatggcaataaaagtcccctcatcagcggtttacagagtaataaacagctgatgaggggatttgtcataaatgactgtgtccggtgtggaaatgcgtcagttatcttgaacgtggtatatcaggatcacacccgctccatcaaaatatcaaccactccgccgcagaccataccatcatcctctgcgtcctgtcctgtaagatccccgtgataaaggataggagactgatccttatcatggatcatttccaacgcgcggcgcacaaccgctgcttccatacagccgccgccaatggtgccgataatggttccgtcctgaaggactaacattttggtgccaacgcttcgcggagcagagccgtggcgggctacgatggtagtcaggatagccggaagccgctcaggagagtgattatttaaaaagcgggatacttctgttgggaagccgcagcttcgtagcttctggttctttacctgaatgatctctgccataatggcaacgccgatctcttctggtgtttccgaaccgatatttaagccgataggcgtatagacctggtttaaaacttccggatcagtgccgttttcaatcaaaacttcctttacttttgccacacgtttgcggctgccgatcataccaatataggcgtgaggcattttggcaatccgttccagacagacctgatcatatctgtggcctctggtaaggatgacaaaataggtatctttggaaccttcgatctggtcaagaccattttcaaaggagtcgcagatcacctggtgggcaccggctcttctggcattgttggcatacagaggacggtcctctaaaacagtcactgtaaattccatcatggcgccaagctggatcaccggcatggaaacatgaccgcctccgcagatcaccaggcgcttttcaccacctaagcagtcgcagaacagtttctttccggcggctgtggcctgtccgctgtcatggagttttccaacttcttcctggttctgggagaagaacccaccttttgtgctttcccagaccagtttatcatctgaaaagaacgctttttccccgaaggcgtcttcttctaaaactgtatagagaatgttctgcctgttgggactgacacttgctatagcttcgtatacatctttaaattctgttgtttctgacattttaatcccccgttttttaatgtactcttggagtacatatcgttttgtctatctgcagtatgctgatggaatatctgcacagatattggaactcgttattatatatttttaataacgcctgctaaatattattcattatagcatcttccgggaacaggggcaagcaacattccagtttcttcacttgaaaatgtgctgacattcgcatatactaggtgcaacagatttcagataggatatttttcataaggggacattgtccttgctcatgtttataaagcaggtatgatgaacttgatcatatctttcagaaaggcgatgtacgaatgaatggctatgtatctgtaaaagaagcttcacacaagtgggaaattccagaacatgggaccaattatgggaaatcccgggaaaatcagaaaaaacgtttgatccgtgccagtagaaatcggatgggaggcagacaggtgtgattaccgatgaaactatatatcagcaatatctgcgtggagaaaccaatgcggctgatctgctggtggaaaaatacgctgatatgctgatcttttacataaacggttatatcaaggatgttcatgaggctgaggacctgatgatagaagccttttcccagatatttgcaaaagagcgtcctattacgggagagggcagcttcaaggcatatctttacaaaacagcccgcaaccttgccctgcggcatagcaaaaaacaccgccacatcttcctgtggattgatgacctggattttgaactgccagataaaaccctggctgagaccaaagtctttcggaatgagcgggatcggcagctctatgcggcactggataaactgaaactggaataccgggaagcagtatacctgatttatctggaggaaatgagctaccggaacgcggcagcggttatgtctaaaagtgagcatcaaatcaaaaatcttgtgtaccgcggcaagcagagtttaaaggcaattttggagcaggagggatttgaatatgcggacgaatgaagaacgttccaggttgatccacaaacggacagcagaaataaaacgggaaaagcaaaacagaatacagcgggggcttgatgcggtctgcatagcagtttgtctgcttttagttacaggtattggggcatggatgccggaactgatgacagaacctgcggcaggaaacattgtccattcttcgggagcggcaagtatgatcggcagtcatgctgctcttggctatattgtcatgggcctgcttgcttttctccttggtgtatgcgtaaccgtgctgctttaccgtctgcggcgcagaaatgagcgcaggagcagagaggaaaaagaagatgaactttgaactgattgacaatagttttcagataaccatattgggattttgcaccattgcagccctttttctggctttgcggtacaaaagcaggagtttgctgatcctcgctttggcatatgcctgtttctgcatgggaacgacatactatatcctgtatctggtcattatgggaaaagtgccgcaggttttctatgtagctgagatttcctggctggccgcatggcttttctatctgtccgtgcagatcctgcggatagagaggatcggataccgcttctcgtggtttgcaggcagcgcggcggtgcttgtcgcagtggtcgcttttgccgaccatgcctttgggccttcctatttcttttccgcgctgtttgcactcgtagcgggagtgaacatgtatctttcggtgtttggcatgcaaagtgttcagccatatcgaagcacggatggtctgatggctggctgcatcgttctgcaggtacttctgtatctggtttccgattttatacaggattatacctgctttaacctttattttgccgtggacattacactgacactatccatggtagcattgctgccatttactctgcgggaggtgggaaaatgacttatatcgaaaatatctttctctgcctcgccataccgatgatactgtcgctgttctttataaaaggacggtccagaagctataccctgtttgtgaccattggaatggggatttgtctgttgagtgcctatgtcaacagcttttttatgtggctatacggcgtggatggaacagttgccgctattgagatcacgcctgtatgtgaagaattattaaagctgcttccgttgttattttactttttgatttttgagccggagccgagagaactgcctatggtggcaattgccattgccgcaggttttgcaacctttgaaaatgcatgctacctgacggaaaacggtgcggctaacttcagcttcctgctgatccgggggatttctgcgggcgggctgcatatcctttgcgggatcctttccggattcggcatctcctatgtctttcgccaccgctggctgtcagttaccggaactgccggaattttaggtgcctgcacaggttttcatggaatttataacctgctgataacagccgatggtggatggaaaacggcagggtatctctttccctctgttttgatcctctgccttttcatagcaaaaatccttcttcctaagttcaccatatctttaaaataatacgaacaaggcacattgagccgtcccgttttggggcggcttaaaattttttcaaaaatttttgatttttagtgagaaaattttaaatttcgtgtcttttagtaagtagaggggtgtgtaaagcatctacaataagggaaggagtgtgacgatgaacggcataactgaaatccggatgcgaaaaatacagtccaggacacggcaataccggcggcgatatgaatggcgtgagatctcctgtctgacagtatgcagcctgtttcttttagccggaataggaattttgcttgggcacatacaggaaccggggatatcttctgtggcagaaggctacggcgcggttctgctgcgaaacggagcagatctgtatgtgaccattggcatcgcctcttttacagccggtgtggtgatgacgatcatctgtatccgttggaggaagaaaaaatggccatacatcggataaggaagaaagtgaggaatgaatatgaaaaagcgattgaacagaatgctcagtaccctgctgatatgcagcatggtgatgacgctgatgcccacaaccgtttttgcgacgaaccgtaaggatgccgttatggaagaatacgcaggcggcttgtgcgaacatcatccggaacatgatgatgaatgtggttactctgaaggaatagcaggaacagcctgcagtcatgagcacacagacgattgctataaggaggtgatcaattgtacccacaggcatgacgaggattgttacccggatgaaattatatgggatgatgaggccactccatccgatgcggaccggtgggaaccggaagagtgtccccatatgtgcgaggaggaaagcgagtgtatttcacagaaattgaactgccggcataaacatgatgatgaatgtggctattcccccgctaccaggggaacaccctgcgaatttgactgcgagatatgtggtgtggatgatgacatgaaaacagctaccccgtctaatgccaaagctgtcactgtggcgggcgtgcaggctatgatcgacgcactgccggatgtggaagatgtcaggaaaggtaatgcagaaaaagtaaaggcccagctggatgccattgacgatgcaaaagcggagctttctgacgaggaaatagatgaacttgatctcttccgttacatggaagttgctgccgcattggaacagctgctgtatggagtagcgacccagtctaatgctgttatgctggcggattatgacggccctgccatccagcttggtacaggtgggatcagtggaccgacagaagaagaggaagagggcaagggcagctattatgtccccaacagctacgtttatttcggtgtaaacagcggaaatagcagcacgcctattaagtggcgggtactggatgcggacacggccaacgatggaacaacaagcggaatgttcctgctgtcggagtatttgttggcgtctgacgtacaatttaacagtaactatagcaagggtaatgcctatcaaggcagcgacgcacagacttggtgcagcagctttgtaggcaatacaagcaatttttccacggcagagcaggccgttatgtttggtgttgcaaagaccgacagtggcgaaagtggtttgtattctattccttggggcgaaagtagattaactgcaaacgacaagctatttttcctgtctgtgcgggaactggcggactatgtgggaaattattgtgatgcaccaggactggcggcaacaaacaccgcgcagagtgcgggcgtgtggtggctccgttctcctgactccggcattggttactatacgggcacggtctacgacgacggtgaagtggtcaatagcctcgtgaaccacgactgggcggctcgtcccgcttttaacttaaattcggattctatcctcttcacatctgccgctgacggcggaaaaacggatgctgcggtaaacggtaatctgaccgaagttggcacaggcagcgcggaatggaaactgacgttgaaagatacaagccgcagtttcagcgcttctgcgagcagcacattggtaagggtaggtgaaaacctgaccgttacttactccggcgcgggtacgggcaagaacgaatatgtttccgctatgctcgcagacaacagcggcaatatcctctattacgggcgcatcgcacagaacagtgcaaatggcacggcaagcgtggagattccgtccgaccttacagcaggaacctataccctgaaagtgttcagcgagcagtataatggcgattataagaccgactacgccagtgaattccagaatattacgctgactgttaatgggaaagtcagtgagcagttcaatcttacgcctggcacgacctactggtttgacttatccagtgcggggattccgggttcaacaaataacgcattgccggatacatcccgacactatgtgccttttacttatgtagggagtctcaacgcttatgtgctgaaacctgcatctgaaaatgtgctgacctcctccgaggaagcttcccaagtcacagataaagatgcaaagtacggatatacttacaagcacagtctgttcattgccgactatactatgacccataccataagctggaaaattctaaatgataacaagctgatttttggcacagactttcagaacaaccgtgtggcatacacactgcgtgcgccatcagcaggacacacctatgcttatggtgataatggcggcagtaccccagacaacaacgagtgggacacaattttgaagaaagccaatcaaagtactcaaaccaatgtaagcgattatatcaaaaattgggaaggcatttggtcttatgggcaggacactgcgaatacatctgccttcaggcagtttcgtacaatacgcggacgtatgatatctgcgttctcctgtaatatggaacataaagcagcatcgctcccaaaatacggtttccgtcctattcttgaaattctggacgctgatacgttgggctatgacggactgaaaaccatagtgcttgacttaaatgatgggaaaattggcgataccacaggcacggtaaatatcgttgtgaaaaacagtgagagcttcacggctcccgaaagttccggcctgtccagtccaatcgggaaaacggatactgatttctgctggcagggcagcgatgggaattcttatattcctggtgcagatgttcctgcaggtgtgacttccctgacggcgcaatggacacctatgacttataccgtaatgttggaaacaaacggtggtacgattgctgacggaaaagatgtgataagctatacctatggcgaaggagcaaccttgccgacagcaaatgatatgacccgagagggctatacatttgatggttggtatgcggacagcagtttttccagcgctcctgttatggagatcagcaacactgacataggaaacaaagagttctatgcaaagtggaatgcgaacatctacgcagtaacgctgaaccccaacgctggaacgattgccagtggaaaggacataacaagctatacctacggcaatggtgcaaccttgcctacatcaaatgatatgacccgcgagggctatacatttgaaggttggtatgcagacagcctattttccggcgctcctgttacggagatcaacagcaccgacatgggcaacaaggagttctatgcaaagtggacgcggaacaccacgccaattatccccggcgatacggtaaactatattgtggagcattacaaggccggtaacaatggttatatgctggaagaaacagagaaacttggagacaaaatcggcgcgaatgttaccgccgagccgaaaatctacacaggctacacttataacccggatgtagcgggaagtgttaccagtggtacattaaaaaagatcagcagtgcggcagatattgtgaccttgaaactctactatgacctgactgtttacaacgtgactgtagaaaacgatgggaacggatctgcatctgctgctccggcttctgcaacgatgggcgggaaaatcacgctgaccgtaactccaaacagtggctatcgctttaaggaatggcagattgtttccggcaacgtgacgatcagtgatgatacgtttaccatgccagcaggtaatgtgactgtgaaagctctttttgaaagaaaatcgagcagtggcggagattcttcttctgaccgtgatgcatcctcttccgcaatcagaaaagatccggtcaggggatggaccagcagtgatcgcggcatcataaccggcgcagccaacagcatggccaatgatggttacagtcactggatgcaggatgcgtatggctggtggctccgttttgcggataacagctatccgaaaggccaaaagcatggtatgtccggcattgcgtatatgtgggaatatatcaatggcaattggtgggcatttgacgagaatggttatgctaaaatcggctggctgagggatgaaacatttggcggctggttctatatcgatccggaacgaggcatgcagactggatgggttcggcttggtggtgcctggtattatttccaccaggtatctgatggtagaaagggcattatgtatgccggacggaaaacaccagacggatattatgtagacgaaaatggcgcgtgggatggcaaagaaaaataaatcagccggaatataaaatggtcagaggtgcgcatgaaaagagttaatatcatatagggcacgacttatagtaatatattcctggaatattttcatgaagcattaaataatttatttgacgaacacacattatttttatatgaattaatgtgtgttcgttatttttaattaacatttttcatatctcatacaaaaaatgaagatgatcatttgaaacacagatataaaggcatttcaaaaggaaaatccccggcattttccaggaaaaacagcagaaaatgtaagcgtttacaaaatttatgtaagtatttacaattttgtatttgaaaagtagaaaaagtgtggtatactgcaattcagagaggacatttccagggtttcggaaaggaaatggtttccggaaaattccggaagagtccagaaagcgaaacaggaaacaatatcagggaatgatccgcataggaaaggagaatatttaaattatggcacttctgaattatgatgtattaaagaaatccggttacgatggctatatcctggaggatgctccagtgaaggttttacagtttggtgagggaaacttccttcgcgcatttgtagactactggtttgatcttgcaaatgagaaagccggatggaacggcaaatgctgcctggtacagccaatcgcaccaggtctttcaaagatgatcaatgagcaggaaggtctgtacactctgtacctgcgcggaagcgaaaacggcaaaaaggtagatgacaagcgcgtgatctccagcgttgctaactgcttaaatccatatgagaaggctgattacgacaagatgatggaagttgctgcaagcgacgatctgcagatcattgtttccaacacaactgaggctggtatccagtatgatccatcctgtaagaaggatgactgcccaccggcaagcttcccgggaaagctgacccaggttctgtatcatcgtttccaggctggtaagccaggaattatcatgctggcttgcgagctgatcgacaacaacggtaaagaactgttaaagtgcgtaaaccagtacattgatcagtgggaactgggcgctgacttcaagaagtatgtaaatgaagactgcattttctgtggttccttagtagaccgtatcgttccaggacgtatccgtgacgcagaagaagttaaggctctggatgcaaagaacggctacgaagatcctctgaccgacgttggtgaagtattcggcgtttgggtaatcgaaggcgatgagaagttaaatgacgtactgccatttaagaaggctggtctgttagacaaggtattcgttactccggatatgagcccatacaagaagagaaaagttcgtatcttaaacggcgctcatacaggtttcgttctgggtgcttacctggctggcgagaacattgttcgtgactgcatgaacaatgagaccatcaagggcttcatgaacaagatgctttacgatgaagttatcccaaccctgccactggacaagaacgatctgttaaactttgcagcagctgtatctgatcgtttcaacaacccatttgtaaaccatgaactgatgagcatttccttaaactccacctctaagtggaaagcaagaaatatgccttccttcctggaatacatcaaggaaaaaggtgctctgccagagtgcctgaccatgtcactggctgcatacatcgcattctacagcaatgatatccagtctcttacagatgcaggtctggtttgcaagcgtccggctggcaacgagtacactgtaagtgatgaccgttgggtactggaattctacaacgatcacaaggatgcttctgcagaagaactggtacacgcagttctgaccaatgaaaagatgtgggatcaggatctgacccagatcgaaggtctggaagctaaggttgcagctgacctgaagctgatccgtgaaaaaggcgctaaggctgcatatgctagctgcctgtaaaatggaagaatataggtcttatttgatataaaatctatacattatttaagaaatgaaggggctgtccgaaaatgggcagccctttttgtaaggatttcagaatactattttattattccggtttttgcgtattcccccagtttttttctcagcaccatatcctgtggatctaagaactgccgcactttatcatagagcacttcatctggttttaacgccgcccggtactgggcgggagtgcgctggaaggtggaacggaaacgggcagtgagagtctttagatcaggaaaaccattttttaatgcaatgtccgtcaggttatccctggtgtaggtcaggtcatttaaggcatgctgaaatcttactcttgtaagatattcgtggaaattgatacctaccatttgtttaaatagagttgaaacataggtccggttgtactgggcgtagtctgccagatcctccagggataatttttctgcataatgttcctctacataactgaggagaagatggatcgtagcgcgtcgtttgtcttcttcagagatcagattgatctgttggggatcaaattctgtaaaaagtgtgataaggagcagctccaggtttacttttgcgcttaactgggcgtaggtaccgccacattctaatgactgccatatctggctggcataaaaacggatgcggcagaaacgttcttcgtaacgggtgttttcattggaaaggcaggtgggaaactggtaaatatatccctttttaactaaaagttttaatgcatttgacggaaaatgcaggaccagagcccgggtgtcaggctgctggcgcatggaggcgtggccgttgcctggtgctgtcaggataaggtcatcttcaaaaagagagtgtgtttctgtaccacggcagtattcctggttgcctttaagaacgatgctcagctcatattcatccgggtgccagtgataacggtaattcataatgctgtgtgcaaagcagcgcaggtggatattttcacggggcagatccatttcataataagtttcttccataggggctcctttttattctctaaaattttatttttcaaaatccaaacattttccctgttgtaaaatttagaaaagatacgatccagattttaaacctgatttcagaatactgtttaatgtggcctgtgtcaacgattgtttttccttaaatacaaaagaaaaaccttggaaactggcagaatgcacaagaatcaggacaaaaaactgacgaaataaacaggggaaatatttggattttttacggtaaaagacagtagggactgagggcagaagaggaaaatggaaaacagagggcagtaaaaagctgcgaatattcacagcgacaaaaaattcacattctgttaggatgagcataacaacaatgagccccggcccgggcagctaaaagcttatggagttttcagactataatttaataatgatgtaataatggaagggaaaagaatatgaatactcaaatgatgatctgtatggtgatctttgcagctactctggtcagctatatgatgaataagataccaatgtggctaacagcaatgctctctctgactgcactgtattttacaggctgcattgatgcaactggcgcactggctggtttttcaaatgctaatacgctgcttatggcaactatgtttatagtagcggcaggtttccgccgcacatctctggtagatggaatgtgtgatgctattatgaaattgacaagaggaagttttctcacagcctattttggatatatcctgattgctgtattactgactaactttattgccagtccgatggttgtatatgcgatcgtaagtcccctgctggcagctctttgtgacaacactggtcacagccgtacccagtacatgttcccggttatggttgtatgtgtggcatgctgcggcatcctgccgctatctactgctatccagcaggcaggacagtttaccggatttatggaaacctacggatttactgatatgagtatccgtgctgtagattttaccattggtacctggccgatccttattattgttcctctctgggcattatttattggaccgaaattcacacctaaaacatcggtagttcctattgaagccctggaaaagagaaatgctggaaaacaggagcagaaactcagtccggttgtagacaagatcggaatcgcaattttctttggtacgatcttatgcctcattttctccagccagttacatcttgctacatggtctgttgcattgaccggaagccttcttatggtattatttggtgttgtagaccagaaagctgcgctgcgcgacattccgtgggatatgctgatgttgtttgtaggcgcactggctctgggaacagcactgacaaataccggtgcaggcgatatgatcggaaatacccttgcatcagctgttggtggaacacataacaattatgttcttggcgcactgtttttcctgatcccgtttgtacttactcagtttatgctgaaccgttctgtatctgcagtatttgttccaatctgtctgcttacaagttctgcgctgggcgcaaaccctgttggactggtactgttagttaatgcaggttccctgactgcatttttaacacctatggcaactccggctgttcctatgtgtatggcagatggaggttatgacttaagggcaatttttaagagcggtgccttgatcacattgatcctgccatttatttatatcttttatactatgaccgtatttccggcattttaaagagaagaaggagtggatatggctatgacccaggaagaaaaaatcgaaattgcggatatggtacgcagccgtgatcggtttggtccggtaagcgaagaagaacttgcagcgctgccgggaaaagaaacagaactttggatccgcacaaaaaacggaaaaacggtgcatgtttttgaagaacgtccagaaaatttaccagaacaggctgcactgctgttaaattttcatggcggtggatttctgaaaggccgtacagaccgggaccgcaggtattgctgctgggccatggaacaactaaattgcctggtatgggatattgactacagccttgcaccggaaaatccatttccttttgcggcagaggaagcttatgagatcgtaagttatgcatttgaacatagtacagaacttggaattgaccaggaaaagatcattcttgccggacatagtgcaggagggaatttagtagcatctgttctgatcaaaaatgaggagacgaaagaactgcatccttgttgtgcattaatggaatatttccctacagataataccgtagatccagtagaaagattgtcagaagaactgaagaaagatccattttgggtaaaacgtgcggagacagaaaaaatgtacactgatttttatgtaggagatgcagatccatcagatcctttgtgttcacctgcatttgccaaagatcaggcattggccgcgtttccagactgtctgatcatatcagccggggaagacagcctcagagatgatacagaagcatttggaatgcgtctggcaaaagccggagtctgtgtgacaatgcagcggatcacagaggctatgcatggatttactacaaaccggacacctggctgggaacgggcactggatcgtcagtacaaattttttcaggagcatttaagatagaacaaatgtcaaaagaaaagatattatatgaggagtaagacaatgaagattacagatgtaaagctgcgttttgcaaagcattacctgtttgtacagatatatactgatgccgggatcacaggtcttggcgaggctggtaactgggggtatttacaggccacagcagcagccattgaaaagtttgcagattacctgatcggaaaagatccgttccgtattgaggattttaaccagaatttcctgcgttccgtgtatttccgcggttctgttattatgagcgctatttctgctattgatattgcactgtgggatattaagggtaaggcacttggagttccagtttatgagcttttaggcggaaagacccgcgaaaaagtccgcgtttatgcatctgttatgcatctcacagaagataacaatgagcttgcaaagcagtatcagcagttgcaggaaatgggctttacagctgcaaaaatcttctgcaacggtccggtcagcgcaccagatggaaaaggggaattttattccagccgtattgaacgtgaagtagaaaaggtacgtgtctgccgtgaagcagttggaaatgattttgactttgtactggaagtgcatcgtggcatgactctgccggaggcagttgcatttggacgtgcagtagagccttaccgtcctatgatcttagaagatccggttccgccggataatgtagataccatggcagaggttgcatccaaagtgggcgttcccattgccactggagagcgctttatcgacctgcgtgaatttgaggtattaatggcacgtcacgcctgccagtatgtccgcccggatgtatgtgcagtaggcggtatcactaccagcaagaagatctgcgcgctggcagaggctcatgacgtccttgtgatcccccacaatccactgggacctgtatccacagcagcatgcctgcagatctgtgcctccattccaaatcttggcatccaggaactgcctggtttctgcttaaacggtgcagaagataagatggtaaaagaaccgctgcgctttgaaaatggatgcatgctgatcccggaagcacctggtattggtgtggaactggcagatgatgcagaagaactgtatccggccaatgagcgtggcagcaatgcagcccgcagggcctttgacgggtctgtaaaagactggtgataacataatatgataccagggtcaaaaggtcagaaatccgacgcaagcttgcttgcagtaggatttttgaacttgggacccgccaaaacatgagtaagaagccattttttgaagaaaaatgagcggattacgaatgtttttaggattgcgggagtgcaatgcacgtagcaatccggtatcagaggggacaaatacggctgcaatgggaataattctcgttgcagcctgttttaataaagttcatttacagatctggtctgctactgcctgtgcaaacacagcgctggcaagatacagaacggagtcgtcaatgcagaaacggccattatggtgtggatattcctttccatcatcagaaggaatggaattatacagaaacgcataacagccaggcacttctgtaaagaagtaggaagagtcctctccacccatggaagaatgatccagttccaggatatcctctgccgggaagactttttttgctgctgtaatgaaatcggcagtcatagttgggtcattgatcaccggagggcagccggacggaactttcatttcagcagttgcgccgtacatggcagcacactgtttactgatctcttccatacgttttaacaggtggctgcgcacttcaagactctgggtacgaagaccgcctacaatggtggcagaatttgggataatgttataagctccatttccggcagtaataccggtgactgttaatacagcaggtacattataggtggattctctggataccagtccctgaaggctgtttattatttcagctgcgatcaaaataggattgatggccagaaacggggtggaagcatgtccgccttttccgtgaatatggatctcaatacagtcgctggaagcaaaaacagcgccggttttccagaaaagctgcccggattttgtgccgtgttgaagggtccggatggaagcagctgctttctgtctggacttttttttatattgtgttatataatggacaaagtgacattttgtccggcggtacatctgtgttggcagaagccgggtgcagttttatgcaaaagaggtaatattttatgtatcacgatctaacaaaggggaacatttcccgttcccttcttttatttgctctgcctatgatggcaggaaatctgctccagcagttttacaatattgcagacactttgatcgtaggccgggtgctgggaagagatgcgttggcggcagttggttctgcttatacactgatgacttttcttacgtctatctttctggggttaagtttaggttccggggcgctgttttctatttacaagggcagaggggatgaaaaaacattaaaatcctctgtatttcatgcctttgtgctgatcatggcagtaacagtagtcttaaatatcctggtctatctgggactggatggcattctggcatttttaaaggtgccggaagaggtatggcagggaatgcgccagtatctgttgatcatctttgcaggcctgatcgcaacatccctttataacttctttgcctgtctgctgcgggcaatgggaaattctacggtgccgctggtgtttttggcagtttctacggttattaacattgtactggatctgctgtttgtggtcgtgtggtctatggggatcggcggtgcggcactggctaccattatcgcacagtacatttcgggacttggtatcacggttttcgcccttcgctgctgtccgcaggtgatccccaaaaagagtgagcttaaatggaatggcggcattttaaaagagatcgtcaacctgtcttctatgacctgtatccagcagtcggtaatgaatttcggcatccttatggtccagggactggtaaacagctttggcccggtagtcatggcagcttttgcggcagcggtgaagattgactcctttgcctatctgccggttcaggattttggtaatgcttattctacctttattgcgcagaactatggagcaggaaacagagagcgtatcaaaaagggcacaaaacaggcttttgcactgagtattctgttctgtatctttatctctgccctggtatttatctttgcaggacagttaatgggcattttcgtaagcaaggcagaaacagaggttattgcctgtggtattaaatatctgcgggtagaaggtgcattttactggggaattggctgtctgttcctgttctacggttattaccgtgctgtaaagcgggcgggaatgtccgtagtccttacggttatttctttaggaatgcgtgtacttttagcttatgtgttgtctgcgaaagtaggagaagtaggtatctgggcggcgatccccatcggttgggtactggcagatattacaggactggtttgtatgttaagatcgaaactttaagacatgttgaaaaggcaaagtccaggtggtttggaataacggaggcatggttgtttggataaaaatgaggacagaacgatcaaaaacaaggtcagagaaaagatacagggagtgtccatgctcccttttggactgatcgccggttttgccggtgaaaaagaaattcgtatcatagagcttgcggaaaacggttttaccttccgcacagcagaaaaaatagcagacccggaattatttcgagtctgcttttatcattatccgaaactggagtatgagcaggtagaactgcattcttatacactggaatgcagcggagaatatgaattttattatgagtatactctatatctggatcatataaaaaataaagatattatgtgggacagtcattttatagatgataatgatagtgcagaatttatagaataccgcaaacaggtacagtatcttttagggtggtatgaccggtatatccggatgaagttactgggagacagtgaagaattggcaagttttatgacagcgtacccggaaggcggggatgtggtcactgccagggactttgaagagcagaaaaaagcctggtttttcagagagacgaaagaaattcacagggatgaaaaagaagtagaagcagaaaaagcaaagaaaacagtacaggatgcaaaacagaaattgaaaactggattggaggttggctcagaaagtccggtatctgagtatgcattggagttggataatccctggctttacgaggaatatttatccaaggatcttacaaccttcatggaaaattactggaagcgaaattacctgtccgggcactggctttccgatcactttccacagcgtctttacatcggaaattccttctgccacctgctttttccaaaggaagaccagttgtttcagcttcttgaaaaagccagaaaagagagcttgcaggtaactttgacattctcttatatccgtgaatttatgttagaaaacacaggtcagctgatagaaaagctggaaaattggtgcgaagaaaataaggttattttggagatacaggtcaatgactgggctatggcagaaatgttaaaggggaaagttttgtttgttccggtacttggaattttattaaataagcggcggaaagatccaagactgcactataaaacagaaacaatggcgcagatcggggcagagacggaaagtaagttccttgaagaaaacagcttaaatgccgatttttacaggaaatatctggaaaaagaatacggtattgtaaggtatgagtgggaaagctgcggctatgatatggctctgccaccaggaaaaaacagcctgcatcttcctttttaccagaccaatacctcccagtactgcacattgtatgcaaagtgtatgacaggagagcggggaaagcagaagctggcagaggaatgtccgaagttttgtaaagactatgcatttttgtatccggatcatttgatgatgatcggcagatataattcgttatttgcactggacagtcgtatttttgaggatggttctggttcaggaacaggaactgaaattggaacaaaaataaaaacagaagaaatattgaaaaaatggaaaaaagcgggtgtggatcgtctggtagtgaacctgcttgatccaggtgttaaaagataaaaaaataaaagtacatgatcaggaaaggagtgaaaacgcagatgaagatcgtagccggacttggttctatagatgaatatatcccctatgtaaaagccggggcagacgaatttttctgtggctacgtcccttattcatggacggaaaaatatgggacacttctgcctcttaaccgcagggaagtcctttgttccaatgtacagttaggcgcgttcagtgaactggaaatactggcttctatggtaaaaaaatacgaaaaaccagtccacctaacctttaattctttatactacattccagaacaatacctggaaattgctaatatcattatacggtgtatgtccattggatttcaaagctttattatcgctgacccggcgctgcttttatatctgcgccagcagaggatagattgtgatattcacctgagtggtgaaacagcagaggtcaacagcgaaatgctaaagacttttgaaaaacggaacctgaagcgtctgatctttcacagaaaaaacagtatagaagatatgggatccattatcagcaaagcaggacagaccacagaatttgaagcctttgcactaaatgaaatgtgtcagtttaccggtgcattctgcaattctctccactgcgatgaaatgtgccatctttgtctggttccctatgaattggggcggatcagagaatgtgtatcagcagaaaacagattgaaaacaagcccattgccagtgaaactccaggaaaatgaaatgaaaaacattggatcagcagaaaatgtggatgaaccggaagatgacagctatctttgtggacagactggctgtggtctctgcgctttatactggttaggaaaagctggtgttactcatttgaaactggtaggaagaggcaattacacagattatatggaacgtgacattagaaatcttcgaaaggcactggaaatattaaaagatgtcctagatatggaaaaaactggaaacattccagccggattaaaagcggaagaaacatatatctctcaaatgaaaaaggaactgtttggttcagctggaaaatgtagtggaatgtgttattatatgaatgtgctatccttttgcaaaaacaacagaagtggtgaacatataaaacggaggaaataatcatgcgctatgcttatgtaggatgccggacaacgaaagagagaaatgcccggggagaaggtcttaaaacttatgaaatccagccagatggcagctggaaatgcctgcagtgtctggaaacagagccaaacccgtcttttcagactctggatggcgaaggaaaatatctttacagtgttcatggggatattacgaaggtttccagttaccgtattttaaaagatcatacattagagcatataaataccattgatattggcggcagaaatcctgtggatataacagtggaccgcaacaataaacatgtaatcgttgccactttacagggaggtaccatttacaccattgaccggaagaatgacggttccctgggagaagtgatcgcagaatttacctatgagggcaaggaaccgggaaaggtatcaaccattcatcagtgtctttgggataaaaagaagaactttttatttgcctgtgcccagagccgtgtaaatggttatggacagatgcgggccttacgttatgatcatgagaccggacagtttactcagacggctcagtttttatccagaacatgggatgagccccgtcacgcagcagtgcacccaaataacctctgggtgtatatgtgtgaggagaagggaaataaagttcttttcttccgttttgatgatgaaaatggtacctttgaggcgttgcaggagctgaccactgtgccggaaacagtgactggatattccgatgccagcgaggtcatggttgacccttcaggcaaatttgttcttgtatccaaccgttatacagacagtattgcagtctaccgtatcgacccgctgaccggttatatgcgaaacgtaggattttacccatgcctgggaaaaactccacggttcttctgttttggagacaatggaaagtgctacgttgcaaatgaggacagtgataccattatagaatttgattttgacaatatgaccggggcactgatcccaacattgaatattgtgcataccggcagcccggtgtgtattctgtttgcagattaaacaaaaactccccctgtatctttgacgtacagagggagtttttacacttttacggacgtaatttgtattacatcagttttttaccatcagtaaaggcatttccaacaacatcacctaaaacaacgtacttgttgttaaatgggtcaaaggtgatcggctgtgcttttgcgatgtctacatttccgttttcatctaatactttctcatcaacactgacattgacgatctcacctaccagacggcaggttttggcatcatagcttttcagtctgcattctacagcaactgccagctcttcaataagaggagcatcaacaaactccgattttacagcatggaaaccggctttttcaaatttatcaggtactttgtttgcagaaacaatgcctacgtagtcgcaggctgtcatatgaggcgcatctgccatgcttacagtaaaggctttgcgggctaaaaggttctttgtggttttgtggccttcgctgatgcacatggaaagttcatttccttcactgatgccgccccaggctgcgttcatcacatctggagtgccgttttcatcgtaagttgcgatcataaatactggctgtggataggtgtatggttttgctccaaaattctttctcatgataaattctccttattatgatagtgtagtagattttaaaatagttccaaattcgtttattcccaggtaagttttcctgtctttactgcttcctcatagcgggagatcttgaaatccagccgcttgatggtgctttcaatctgtgctttctgctctaataaggtttccatctgctcctttaaaagaagcattctggcttcgatggtggaatctccctgctggcacagttttacatattcgatcatggcttctacaggaagtccggcgccacgcatacacagggccagttctacccagccaagatcagactcgctataatcgcggatgcctccggcagtccgggtcacaggtgggatcattcccacacgctcgtagtagcgcagtgtatcactggaaatattgtatttctggcttacttctttgatggtcacggtttcacactcctttttcataaaagtatagttttctggtctgaaaacattatacaacctggagctgactctaagtcaagatatacaggcaaagtggaatgttaattgccgcaaagcagaggcaaaattacttcttaggctgataccgtatatcagatactgtatatacagtaataaatgcatgtgggtcttcacgattgatataattcatcagtttctggtactccgatttgtctacaatagtaatgatctcattgcgcttttccatattgtaggcgccgatcgactcatagatcgtagcgccgctgtgcaggtcattgatgataaaatggcgcagttcttcttctttttttgtgataatgcagacccggcgctttacattgtggttaaagataaaatgatccaggatgatgccgttaaaataagttcccagtacacttaaaacaacggttttcttgtcatacaccaaagctgctgaaagggcaacgcacatgccggataaggacatggccttcccaagatccatgtgcagatatttgttcatgatcttggcaacgatatccagtccgccggaagaagcatttcggttaaacaggatgcttaaaccgatactgactgttaaaatatagcataaaacatccagttcctgactgtcagttaaggagccgatgttcgggaagatcctttcaaaaagggccaggaaaaggggaagtacaatactggtgtatacggttttagccccgaattcttttccgcaggtgaaaaatccgatgatcagtaaaagtacatttaagatcatggtgatagcggaaaggggcagaggtacaaagttagataagataataccaagaccggagatactgcttacggaagcatggcttggtaaaagaaagaagtacacagctccggctacgatggccatagcggctgtaaggatcagtgtttctttgatcagttctgtaatatggttgtttgaatggttcatgacacacctctgtgggattatagttggttacagttaaaccaggaagtgtaactgtatctgcaacattcattttaccatagcttgattgttttagaaagcggggatatacttttagcaaaaagacctctcagatatgatccgtatttggaatgaagtagtagaagatggtgtggcatttccacaggaagaatttcttacagaagacagaaacaaagtaaaataaagaagattaccccactttccagagagctttataaaatattattcctcattcaatttccagtctgaaagaagctttaattcgatttttgttccgtttggaagtgagaaccagtggtcgttaataggggtaacaggatatgctttgatttttttcatgatttcaggaacagagtctacagcaagggaaatatggtcgtagccgttttcagcagaaacagatatttctgttgcttcgcataactggatcccttctttgaaccagcatttgcgtcctggtttttcaccaatctccctccacatatgcatattaaaaacatccttaaaaaacgtttgtgcttcctcgtaatgaactgtgcggatagcagcatgatcgagcttggtcataaaaatgtcctttctggcttctttttcttggaaaaggccataaaatgtatgattaagtatggatatgattatacagcaatactctggatgtgaaaatagttttttttaaataagacatataagtttttttaatggggcatgtaagaagaaggcaggatatacgggagtttgacacctttccgaatgaaaaacagcgtataagccgcatgaatgcttatatttttttgtcaaattttttgtttttatatataggctttttcggctttttgcgctataatggtattgaggtgaaaaaattgaaggtcaatacatcaaaatcaaaaaacgctgagtctttttatataaagcaatcctacatcgacagtaac

SEQ ID NO: 3540 - DNA, 23564 bp, Unknown
  gut microbiota DNA sequence
ttctctatgcgggtgtcgatccaaagacagttcaataccttgccggacacgaaaacagcaaaacaactatggacatctatgcaaaagtgaagtacaataaaccagaggagctgtttggggtagtaaatggtgcgtttcatcaggctatcgctgaatgaaaaaaggtcattttttatggtccgcacaccggataactgagaagcagaaagccggaaaagcccggaatatcaagggaaaacggcaatcaaagaatttcagtacggtctgaaggctgcacgtcgtgcacctcagttcagcaagcgataatcgactgctcagactatatcaaaatggttcaaaaaccccggaaaatcaaggttttccggggttttcttgtacccagacttatctgtatagtttgacctcatttgacctaacgagagccgttttcactggagttttagtggtccgtaagtggttaacctatcgtacagcttggaaaggaatatgagatcttgggctgatgaaagagcgcctgagtaaccgcaaaattgcggaaagactgttcctgtccgaaggcagtattaagcaatatatcaatcagatttattctaaacttaacatagatgggatacccgggcgaagcggcagcagattttatccatgctgaatgccaacccctaacctttggttaatggttatcttttttaatccactgtacaatatttgtacggtggattttttattgacttaggaggagtgagaaaatgaaggattggaaaaaatgtacggcttttctgctggcgctggtcatatgccttggccttgctgcctgcggagtgggaagtagtgaaggtgaaagagaagattactatacccccggtgtgattgaggacaccgactatgacttcacagatgataatccggcagagcaactgggttatgactctattgaggatatgcgcacacaggaacatgaaatcatctcttccgatgataacgacaatacagtcgccgagggatattggtatcctgacggggataggagcagctccctctattttatggtccagagagataccatttactggtatgaatttaacccagggcagggggatgttcaagtgggagaaccggatggcattgtactcaagttaggaaataagcgccgtcttcagagcgggcagacatttcagtacacaacttccagaggattggatatgagctacagcaaaatttgtttcgagggagacacaacagaatatttttggagggagcgctgaaaggcattcctgtggttaaagaagaaagctatatggaacaaagatatatttcaaaagtaaagccactaagccagtatattttacaagttgactttgtctccgacagtcgtttgctcctggatatgaagctcctgtgtctttgtccctgaaggcactgttcccggctgggcagttgatacggaaaccggtaatggtgagttttcaaacatcgctggtatctggtatctggatggagatgcggatgcaattacaaaggtgttgatccaaagacggtgcagtatccggcaggccacgagaacatcaaaacccttggatatccagtattttcaagggttttcttatgtttatggttcataaagaattgatgtgaaatttggtcaaattcttcttaatgttatcaaaaattgattgaatgcctggggataaacgggaatacaggattgaaaatatatttttttcattagttcttgacaagtaaccattcggtaactataatggagttaccgaatggttactttgataaaggagatagttatggcagagagtacaaaggaacggattttgaggatggcactggagctgtttgcgcagaacggctatcttgggacgtctatgaatgatattgcaggacagttaggatttacgaaagccgccttatataagcactatgccagcaaacaagaaatcttagataagatcgtggagcggatgaacaagatggactatgagcgcgcggaagtctatgaaatgccggaaacggaaccagacggctttgcggaagcatatctgcatacaccaattcagaaaatccgcacatacagtcttgcccagtttgaccattggacaaaggaaccgttttcttccaatttccgtaaaatgctgacgctggagcaataccgtgatcccaagcttgcacagctccatcatgactatctggcgggtggtccactggagtacatggcggccatcttccgcaagctggcagattctgatgaggatgctatgcagttggcgttggaattctatggtccaatgtatcttttatacagtgtctacgacggtgctgaaaaaaaagaatctgcttcttctttgctggcgacacatattgatcactttattgccaaggttgagtctgattacagaaagaaggggagaacaacatgaaagatgtgggagaagaaaaacgctgggtcttatgcccgtggtgcggtgccaagacgcgcttgcagatactgcgggagacggaattagtaacttttcctctgttttgtccaaaatgcaggcatgagagtattatcaatgcaaaaaattttatcatcgaaaccaaacagccagacgctaagacgcagtgctgatcgcaaaaacgatcatgcgctgcgtcctatttttttgaaaggagcaactattatggatgcaattatttacaccaccaacaccggaagtaccgggcagtatgcaaagctgctggcccaggaaaccggacttccggcatattcccttgcagaagcgaaaaaacgggtctttgctggtgcggaggttgtctatcttggctggatcatggccggttcggtcaaggggtgtgccggggctgcgaagcgctatcaggtgtgcgctgtctgcggcgtcggcatgggacaaaccggaacgcagacagacagcgtgcggaaaaagtcagaaattccagccaacattccgctgttcaccctgcaaggaaacttcaatgttaaaaagctacacggtatttatcgattcatgatggagatcatggttaaaacagtgggcaaaggtctggccgcaaagaaagaccgcacgccggaggaggacgatatgctggatatgatgctccacggcggtgagcgggtcaaggcggaaaatctaagcgccattctcgattggtacagagcgcagcaataaatgttctctcggggtctttcttacacctgcttttgtggatgattttccgctgtcttagaaaggggaatgagataaaatgaaaaatttaattatatatgttcacggaaagggcggttcggctggggaagctgagtattacaaaatgttctttcctaatagtgaagtaatcgggtttgattactgttcgcaaacgctttgggaagccaagaaagagttttttgcattttttaccacacagagaagtaggtttgagcacattaccttggttgcaaacagcatcggggctttctttgggatatcctcgctggatgaaacgctggttgaccgggcttatttgatctcgccaatcgtggatatggaaaaactgatctgcaatatgatgcaatggtcgggggtgaccgaacaggaacttgccttaacatccattgaaacggtatctgcatttgccaagcagcaccatgctggcctgaccgtcatgcccggcggcgagcactggttccatactgaggaacagatgcagttccttgatcattggatcagagaatgtaatgcgaaaaatgtctgctgttaattatacaaaatcattgataaaagagaaggagaataattatgtcagaaaagaatattatcattcgtctggaaacaaaagacgattacagagccgtcgaaaacctgacccgcgagtcattctggaatgtttatcagcctggctgtatggagcactatgtgctgcattgttatagggatgacccggcatttgtgccggatctggattttgtgatggaactgggcggtgagatgatcgggcagatcatctatgtacggtcggagatcgactgtgacgatggacgaaaggtgccgatcatgaccttcggccccattggcgttgcacccgcatacaagcggcagggctacggaaagcagcttctcgactattccatggaaaaagctaaggaaatgggtgcaggggcacttgccattaccggcaatattgacttttacggcaagtctggctttgttccggccaaaaccaagggcgtgtgctatgccgacgacccggatgcggactattttctcatcagagaactgacccccggatttctggacggcgtctccggcacttacaaagaccctgaggggtattttgtctgtgagaaagacccggacggatttgaacggtttgaagccaccttcccggtaaaagaaaagcagaagctgccgggacagctgttttgaaaatcccggtggcggtcttacaggaaagctgtttccaactggcaataaacaggatattttagatgtgcctggatatggaaaactgcctgtaactcttattgactgtgccaatccggtagtcatttttaaagcagaggatgcaggattaaatggaacagaaacctgtataggcgcctgttccgtttttattatgttgcagaaatacctcttgctgtgctgggagggggtgagagaatgttttagatccaccccccatcaagcccaatgatctgtcctgtaagataggattctttataaccaagatgataagccagatcagctacttcttctgctttaccaaggcgtcctgccggtatctcatctaccagtgcgatcagttcgtcttcttccatccactggttcatttctgtgtcaatggcaccgcaggcaatagcattgacctggatgttgcttgggcccagttctttggcaagagcacgggtcagagcgttgatgccgcctttggttgcagagtaagctgcttcacaggaagctcctgcaacaccccatacagaggaaatattgatgatctttccctgtttttggtgtaccatataagggatcgccaatttgcagcagttaaaaacagaagttaaattcatatggagaattttatcccagtcttcactgctcatatcctgaagcagtccgatgtaggaaacaccggcattatttaccagtacatctatacctccaaactgtttctttatctttgcgaacagttctttgcagcaatccatatctcccatatctcccatataggcaagacaaggtacctgataattctcaatttctttttttgtctgcatcaggcggtcttcattgcggatgcagctgatgactacattatagcctttccgggcaaatttaatggcaatggcttttccgataccacgggaagcgccggtcacaagtacagtttttcttgacataagctcacgttcctttctgcatgtgtacagtactgtttctgttcgcgtgttccacgatcagtgacgcagtatttgctctttctattttagcacagaatggagaggttggcatatatctggttgatctgtaaagataattgtaagaatttgaagtgcaacaatagtaaaatctatgctataataattacgaattggttacaatatattaagagataatgaaaaaatagacaggaaacaataaaaatgacatcacatatctatgatctgatcataatcggttcaggaccggcggggcttgcagcagctgtgtatgcccagagagcctgcctggacactctgataatcgaacgatctacggtaagcggcggacagatattaaatacctatgaagtggataattatcccggatatcctgggatcagcggttacgaactgggaatgaagctgcgggaacatgcagatcatctgggtgcgcaatttaaagaagatacagttttaaaaatagaagataaaggcctggaaaacttaaaacaggtcattggaatgaatgaaaactatgaggcaaggacactgatccttgcaacaggagccgttcataaaaagttaggcattcctggtgaaaaagaactgacaggagccggtgtttcttactgtgctacctgtgatggtgcatttttcaggaacaggaccgttgcagtgatcggcggcggtgatgtagcagtggaagatgccattttcctttcacgtatgtgcagtaaagtctatctgatccacagacggggaaaactccgtgcagcaaaaagtcttcaaaatcagcttttctcaaaagggaatgtggtaatactctggaatacagaggcagaggctataaaaggtgatggagcagtagaaagtttattgctccaggatcatgttacaggtgaaaagaaagaaatttctcttcagggcgtatttattgctgtaggaatacagccggaaacagctgcttttgaaggcgttgtggatatggaacagggttatatcaaagcaggagaagcgggaattacttctgtacctggtatttatgcagcaggcgatgtgagaacaaaaaaattgcggcagatcgttacagcagcggcagacggtgccaatgcagtgaccagcgcagagcagtatctgtcagacttaaagagaggataagagtaccgatgaacacatggaaaaaattactgatcatcagcggaatgtgcagccttgcaggtgtgacaccggcttttgcgtccacaaatctggaaaccggttcctctcttgcgggaatttccgtagcgttaaataattattatgccggaaatgcacagccggaaaagaagctggcgtcatcttacaatcagttggaggcaacagaaacgaaaaaaagcagtgaaacaaagactgcaacagagacaaaggccgcagcaactgcaaaggcagaaacaaaagcccagacctcatccggagcaaaaacagagacaaaagcagcggcttctacagaagtaaaggcagcagctgtttcacagacaaaggcagcttcttctgcctatgataatattgcagtatctaaagtaagcggatctgtaaatatccgtacagaggcaaatacctccagttccataacaggaaagatctacaatgactgtgcagcaacgatcttagatacagtagacggcgaaggcggaaaatggtacaagatccagtccggctctgtaaccggctatattaaatccgaatattttgttacaggccagaaagcagaaacaaaggcaaaagaagtaggaaagacctatggaacagtggtagataccaccagccttcgtttaagagaaagcccggatctgaccagcaagacactgacacttttatcagaaggcgcccagtattctgttgtgggacaggaaggtgatttcttaaaagtagctgtggatacagacctggaaggttatgtatttaaagactacatgaaaaccagtgtagaatttaacaaagctgtttctgtagaggaagaaaaagccaaagaagaagacgaagccaagcgtaaagaagaagctgacaaggcaatgaaagagttagaagctgcaaagaaagcggagagcaaggcagcagaaaccaaagcagagacgaaagcggaaaccaaggctgagacaacggctgcaaagaaagaaacaacagctgctccaaaggaagagaccaagaaggaaaagacaaaagaaacagaggcagccataaaagtgattgcagccaatccggaaaaggcagaggatgtgacagtagctgctccaactgttaaacaggagacaaaagcagaaacaaaggcagaaacgaaagctgagacaaaggcggaaacagtagcagaaacaaagacagaaaccaagtcagagggacctggagcaaagaaagagacaagctcttccaagaagacagaaagttctgctgtagagacagcttccagaactgcactgatcgcctatgcacagcagttcttaggaaatccttatgtatacggcggcaccagtctgacaaagggcgctgactgttccggctttgttatgagtgtattctctcatttcggtatcagtacaggacgcagttccagagaccaggcagcaagaggaaaggcaatcccggtcagtgaagtaaaaccaggagaccttttattctatgccagcggcagctatatcaatcatgtaggtatttatgtaggaaatggaaagatcatccactccagtacacctgctaccggtatctgctatgcaccgtctaattacagaacaccttgcaaggcagttacattttttgactgatcctgttgaaacgtaaaagtacataatcaaaattaaatatgcatcataatgcacataaaaatgggggagccggttttggctcccctgtttgtttttatgaagttttaaaagtttttagaattcaggttcgatcagtccataagtaccatttttacgcttgtacactacatttacctgctcagtttcggagttcaggaatacgaagaaattatgtcctaacatttccatctgaaggcaagcttcctcaggatttactggcttcatagcgaatttcttggtttttacgatctgaatatcatcttcgtaagcggtatcttcttcatcctcaataaatgcctgggagaatgcgatagctgcctgcttcttgtcgatgagtttctttttatatctgcggatctggcgttcaatgatctcttctaccagatcaatggatacatacatatcggtgctgctttcttcagcacggatggtgttgcctttaactggaatggtcacctcgattttctgttggtctttctgagcgctgagcgctacgatcacttcggtgtcaggagtgaaaaaatgttccagctttccgatcttcttttcaacggctgctttcaaacctggagttacctcaatatttcgtcctgttatggtataacgcataatcatcaactcctttttctgagatatgcacattatatcatgtttattataaaattacaacataaaatctcaaattgactaataatttatcttaattttttataaaaaaagtatatgtagggtgcaaatggctattgaattattaatagtgtacatgaaaaaatgtcaatagtaactgtgcatattttgatgaaaaacagcagatttatgagatatatacaaaaaagaaaggacaggaaaatgtaaaaggggtgtaaaaaagaacagggtaaaatatgtggataatgtggataagtcggtgtataactagaaaatgcagaaaaaccgataaaaatcgatgtggataactttgggggaaaactttgtggataagtgtggacaatgtggatgtgcacaaaatcgaacatactttttgtgcaagatgtctggtttaccataatatggggggaaatgtaaactttttatgaagtcgttgaataaatcccgctcaagtgttacaatgtattagattgtatcataagcgtactggctgcatttgcggcacagatgcaggttgaaaagaattttcatttatataaggaagaagttaggagaacttaccatgaacgtaattgagaaactgttcgggactcacagtgaaagggaattgaagatgatccgcccgattttggcgaagatcgaaaacctgcgccccgaaatgattgccaagtcagatgaagagctgcgcgatcagacccgtatcctgaaagcaaagctggctgacggagcaactctggatgatattctgccagaggcatttgctactgtccgtgaggcggcaagaagaacactgaatatggagcatttcccggtacagctgatcggtggtatcgtactccatcagggccgtatcgcagagatgcgtacaggtgaaggtaaaaccctggtatctacctgtccggcttacctgaatgcattaaagggaaaaggcgtacagatcgttactgtcaacgattacctggcaaaacgagatgctgagtggatgggacaggtacatcgtttcctgggtctgactgtaggtgttgtattaaacgacatgaacagtgctcagagaaaagaagcatatgcctgcgacattacctatgtaacaaacaatgaacttggtttcgactacctgcgtgataacatgtccatttacaaagaacagctggttctgcgtgatctggattactgtatcatcgatgaggttgactctgttcttattgatgaggcaagaacacctctgatcatttccggacagagcggcaagtctaccaagctgtatgaagtatgtgacgttttagcacgtcagttagagcgtggtactgtttccaaggaattctccaagatcgatgccatcatgggtgaagagatcgaagagaccggtgacttcgtagtagacgaaaaagataaagtagtcaacctgactgaacagggcgtcaagaaggtagaggaatacttccacattgataacctggctgatccggaaaatctggagatccagcacaatatcatccttgcacttcgtgccaacaacctgatgttccgcgataaggactatgtagtaaaagatgacgaagtcctgatcgttgatgaatttacaggacgtattatgccaggccgccgttattctgatggtctgcatcaggcgatcgaagcaaaagagcatgtaaatgtacgtcgtgaaagccgtacactggctaccattactttccagaacttcttcaataagttcgcaaagaaggcaggtatgaccggtaccgctcttacagaagagaaggaattccgtaacatctatggaatggacgttatcgtgatcccaaccaaccgtcctgttatccgtaaggacttagatgacgctgtttataagaccaagaaagaaaaatataatgcagttgttgaagaagttgtaaaggcacatgagaagggacagccggttctggttggtaccatcaccattgagacttccgaacttctcagcaagatgctgaccaagaagggcattcctcataaagtcctgaatgcaaagttccatgaattagaggctgagatcgttgcagatgccggtatccatggttccgttaccatcgctaccaacatggcaggccgtggtaccgatattaagctggatcaggagtcaaaggatttaggcggcttaaagatcattggtacagagcgtcatgagtcccgtcgtattgacaaccagctgcgtggacgttccggacgtcagggagacccaggtgagtccagattttacctgtccctggaagatgacctgttaagactgttcggttctgagcgtctgatgcatatgtttgaggcaatgggcgtaccggaaggtgagcagatcgagcataagatgctttccaatgctattgagaaggctcagatgaagatcgagggcaataactacggtatccgtgagcagctgcttaaatttgacgaagtaaacaatgagcagcgtgaagttatctacaaagagcgccgcaaggttctggatggggataacatgcgtgatctggttctgaagatgatcactgacattgtagagaatgcagtagatatgtctgtttctgatgaagatacagcagagaaatgggatctcactgagttaaacaatctccttctgccgatcattccattaaagtctgttgtactgacagatgagcagaagaagtccatgaagaagaacgaattaaagcacaccttaaaggaagctgccatcaagctgtatgagacaaaggaagctgaattccctgagccagagcagatccgtgagatcgagcgtgtggttcttctgaaggttattgacaacaagtggatgtcacatctggatgatatggatgctctccgtgaaggaattggcttacaggcatatggccagagagatccggttgttgagtacaagatgcagggctatgagctgtacgaggctatgatggctgcgatccaggaagaaactgtacgtatcctgttccacatccgtgtagagcagaagatcgagagagagtctgctgccaaggttacaggtaccaataaggatgcaactccgatcgctccaaagaaacgtgatgagcagaagatctatccaaacgatccatgcccatgtggttccggaaagaaatataaacagtgctgcggacgtattaaataagtcctatatgaacgaattgaaaaatcttcctgcgtggcagtaaaccatgcagggggatttttgcaaaataattaaaaatttataataagaaagcgggtgaagctgtggttgagttagacaattttaaatatacgttatcaacgtatgacaaaccattagtggaagtgagggattcactttgacctggataataaggtcagacgaatcgacgaattagataaatccatggaagagccgggattttgggataatccggagcgctctaccaaactggtgcgggaagcaaaacacttaaaagacgaagttgatactttccgtgaactggagcaggaatatgaagacatccagaccatgatccagatgggttatgaggaaaatgatgcttctctgatccctgagatccaggaaatgttagatcatttttcagagaccctggaaaagatgcgtatgaagcttctgctttccggcgaatacgatggctatgatgccattttacgtctgaatgcaggtgcaggcggaacagagtcctgtgactggtgcagcatgctgtaccgtatgtactgccgttgggctgagaaaaagggctttaaggtagaagtccttgactatctggacggtgatgaagcaggtatcaaatctgttaccattcagatcagcggggaaaatgcctatggctatctccgttccgagcacggtgtacaccgtctggtacgcatttccccgtttaatgcagcaggcaagagacagacttctttcgtgtcctgtgatgtgatgccggatattaaagaagacattgatattgagatcaatccggacgatatccgtattgatacctaccgttccagtggtgccggtggacagcatatcaataagacctcttctgcgatccgtattacccattatcctacaggtatcgttgttacctgccagaatgagcgttcccagttccagaataaggacaaggcaatgcagatgttaaaggcaaagctgtatatgctccgccaggaggaacaggcagcaaaggcagccggtatccgtggtgacgtaaaggacaatggctggggaagccagatccgctcttatgtccttcagccttatactatggtaaaagaccatcgtacaggggaagaaagcggaaatgtagatgctgttttagatggctctattgacaactttatcagtgcttatctgcgctggatgagtcttggctgtccgaataaaaatgccatgtcagacgatcaataagcatacgcataataaatttacaaagactgctgtaagacgaaaagctattttacagcagtcttttttatgtgttatagatggatctgaaatattgtatactttgttcttaatttaacataagaaagtggttgcaattcccataaaagtatgttaatatcttcctcatgaatacagatgtgttcgcgatacggacatggacaggaaggaagaaaagggttcatggaggacaaaagtaagtattttgttgtaaaacaaaaggcagtgccggaagtacttttaaaagtcgtagaggcaaagaaacttctggaaacagtaagagccattactgtgcaggaagctgcagaccgggtagggatcagccgcagttctttttataaatataaggacgatatttttcctttctatgataacacaaagggaaaaacgattacactggtagttcagatggatgacagacagggacttttaagtgacctgcttcatgtggttgcagtgtaccgggcaaatatccttaccatccatcagagtattccggtcaacggagtcgctactttgacactgagtgtggaagtaagggaagatacgggaaatgtttccagtatgatcgatgaactggaagtattagacggtatccattatgtaaagatactggccagagaataaaaacaaagatcgggccggtaaaaaatatcaggtagcatacagggagcgagagattatgatcaagacagcagttatgggatacggtaccattggatctggtgttgcagagatcctggaccagaataaggcagaagttgcaaaaagtgcaggacaggaagttgaattaaaatatgttctggatctgagagattttccggacagcccggtagcagataagatcattcatgattttaagatcattgaagaagatccggaagtacaggtagtagtggagactatgggcggattaaatccggcatacccatttgtaaaggcctgcctgttggctggaaaacatgtagttacttccaataaggctttagtagctgcttatggaacagagctgcttgcgattgcaaaagaaaaacaggtaaacttcttcttcgaggcaagtgtaggcggcggaattcccatcatccgtccattataccgctgcctgatgggcgagcgcattgaagaaatcacaggtatcttaaacggaaccaccaactatatcctgactaagatggataaagagggcgaaacttttgaaaatgccttaaaagaggctcagaacctgggatatgcagagcgcaatccggaagcagacgtagaaggccatgatacctgtcgtaagatcgcgatcttaacttcaatggcaacgggaaagactgttaattacgaagatatttatacagaaggtattaccaaaattacagatatcgattttaagtatgcagagaaaatgggaacctccattaagctgtttggaaccagccgcatcaaggatggcaaggtaagcgcttatgtagctcctgttatgatcagtaagaacaatccgttatactctgtaaatgatgtatttaacggcatcgttgtaaagggaaatatgctgggaacttctatgttttacggaagtggcgcaggaaaactgccaacagccagcgcggtagttgcagatattatcgaagcagtacagaatatagacaaaaatgttccacttggctggactgatgaaaaacaggagatccttcctatggatcagaccaagttccgctactttatccgtgttgcaggctcttacagaaacaaagagcaggagttaaatgagtatttcggcaaggccgaggtgatcgaactctacggaatggatgaatttgcgatccttacaaaagaaatgacagagggagaattaaaggcagctgcaagcgcctttgatacaaaagcccagtcacgttctgaatatggtatcaagcagatgatccgtgcggtgctgtaattcatacttcaataaataaacaggtaaaataataaaagccattctcttaatataaaaacgagagaatggctttttgcgtgttcaatattaattttatgaaacaaactagtttgccggtgcctgcatctgcatctgaagctgttgctgcatctggtagatcaactggttgatctgcggtccctttaccgggtcacggagcagatcataataattgatcaggctgtaaaagaagaacatggtaagagcgatcgcgatcacactgaagataaaaccagccagtgccttacctggatatttctttcccggacggatgtccgcgttttttgccataatggcaagcacgataccgattactccgcagatcagtcccataggagtgttctttccgcttacaagggaaaatggcagataaaaaaggctgcagataatacctgcaataccgctgatcagggagcaggctgccagctgttccgctgagctggatgtttttcttggttttttggaagtattattcataagttaaagtaggatcctttctatttcgcttattatagcatgaaaaacaatcactgtccagacaagggcaagtcttgcataaggtccgcggatgaattataataaaacctcagaacgacaaaaaatatgtgaggactatcaatggatattattaaagcactggcagaagaactgaatattggacgccaccaggcagaggcagctgtaaagctcattgacgaaggcaataccattccgttcattgccagataccgtaaagaagcaaccggttcattaaatgatgaagttttaagaaatttagatgaacgtttaaaatatttaagaaacctggaagacaggaaagagcaggtcatcagtgctatttctgaccagggaaaaatgacagcagaactggaaaaacagatccgtgaagcggcaactttagtggcagtagaagacttatatcgtccatacaagccaaaacgccgtaccagggctatgatcgcccgtgaaaagggcttagagcctttggcaaatgtgatccttttacagaatttaaaagaacctgtggaaaaagcggcagaggcctatatttctgttgaaaaaggcgtagaaagtgttcaggatgccattaacggtgccatggacattcttgcagaaggcatttctgacgatgcaaaataccgcacctatatcagaaacattaccatgaacaagggacttctccagtcaactgcaaaggatggggaaaagcagtctgtttatgagacatactataattacgaagaaccggtgaaaaaagcagccggacaccgcatccttgcattaaacagaggagaagatgagaagatccttactgtaaaggtggcagcgccaacagagcagatcttaggatacctggaaaaacaggtgatcacaaaggaaaatccatataccacacctgtattaaaggcagtgacccaggacagctacagccgtcttattgctccttctgtagatcgtgagatccgcagtgaactgactgataaggcacaggaaggtgctatccgtgtatttggaaagaacttagagcagcttcttatgcagcctccaattgctggtaaagtagtattaggctgggacccggcattccgtaccggctgtaagctggctgtagtggacagtaccggcaaagtattagatactgtagttattttcccaactgccccacagaacaaggtggcagagtccaagaaaatattaaaagacctgatccataaatatggcatttccctgatctctgtgggaaacggaactgcttccagagagtctgaacagatcatcgtagagctgttaaaggaattaaaagagcaggtacagtatgtgatcgtaaatgaggccggtgcttctgtttattctgcaagcaagctggcaacagaagaattcccgaagttcgatgtaggacagagaagcgcagtttctattgcaagaagacttcaggacccactggctgaactggtaaagatcgatccaaaatccattggtgtaggccagtatcagcatgatatgaaccagaagaacctgggagaagcattgggcggcgttgtagaagactgtgtaaataaagtaggcgttgatttaaatacagcatctgcttccctgttagaatatgtttccggtatcaacaagactcttgcaaagaacattgtggcatacagagaggaaaatggtgcttttaagaaccgtaagcagctgttaaaggtagcaaaactgggtccaaaggcatttgaacagtgtgccggatttatgaggatcacaggaggcgataacccattagacggtaccagcgttcatccggaaagctatgaggcagcaggaaagctgttggagaaattgggatacacagaagatcagctgtcccatggcggtttaaatggtatcagcaaaaagattggtgattataagaaaatggcccaggaaatgggcgtaggtgagatcacacttcgtgatattaccgctgaactggaaaaaccggccagagacccgcgagatgagatgccgcgtcctgttttaagaagtgacattatggaaatgaaagacttaaagccgggaatggtattaaagggaaccgtgcgaaatgtcattgactttggtgcgtttgtggatatcggcgttcatcaggacggcctggtacacatttcccagatgacagaccgttatattaagcatccattagaggcagtaagcgtaggcgacgtggtagatgtgaagatcttaagcgtagatatggacaagaagaggatcgctcttacaatgaagggagtaaaggatggtaattgatacttggggtccggaggaaacaagggcttttggaaagaaaatgggacaggaagcaagaccgggacaggtgatctgcttaaacggtgacctgggagtgggaaagactatcttcacccagggatttgcagagggactggggatcgatgagccggtaaacagcccgacatttaccattgtccagcagtatgatacaggaagactgccgctttatcattttgacgtataccgtatcggtgatatcagcgaaatggacgagatcggatacgaagactgtttctacggagacggcgtttctctcatcgaatggtcccagctgattgaggagatccttccggaacatgtgacagagatcaccattgaaaaagacctggaaaaaggatttgactacagaaagatacgggtggaggaaaaataatgaaagttcttggtattgaaagttcatctttagtagccagtgtggcacttgtaacagatgacattctcacagcagaatatacagtaaactttaaaaagacccattcccagacactccttcccatgttagatgagatcgtaaaaatgctgggactggacctggagactattgatgccattgcagcagcagggggcccgggctcctttaccggtcttcgtattggcgcagctactgcaaaaggactgggactggcattaaagaagcctctgatccatgtacctacagtagatgctattgcttacaatatgtggggggcatccggtcttatctgccctattatggacgcaaaaagatgccaggtatatacaggactgtaccacatggaaaatggaattgagacggttatggagcagtgccctatggatatgggagaactgatcgaacagttaaataaacagtctgagcgtgtgatcttcttgggagacggcgtaccggtatacaaggccatgatcgaagagaaaatgacagctccttatgtatttgcacctgcccagatgaacagacagcgtgcatcctgcgtggcagctcttggtatgaaagctctgacagaaggctatacaggagcaaaagtccagcctgcagacgaatttgtaccggattacctgcgtaaatcccaggcagaaagacagcgggaggcagaggcttcaccagacggacaggcaggaaaacttccgggagattattgatcactgtttattacaagaattgggagaaagagataaatgtgtgtaaatgaggctggatcgatccgcctgatggaagaaaaagatgtagaacaggtggaagagctggaaaaacagtgcttttctgttccttggtctgaaaatatattaaaagacgggctcaccggcaggtttgatacctacctggtatgggaaaaagacgggatcgtagcaggctactgtgctttaagagttcttgcagatgagggagagatccagcgtattgcggtccttccttcctggcgccgtcatggaatagccaaaagcctgatggaagccatgatacaggtatctaaagaaaaaggggctgttcagatgtcactggaagtgcgggaaagcaatacaggcgccagaaaactgtatgaaaattatggttttatccaggaagcagtccgcaaaaattactatgaaaacccggtagaaaatgcctgcatcatgtggaaacatgagttgtaagaaactaccagtaaaaacaggaataaaatccgtatataatggagagggacgggagacgttcctctctttcgtttatggtaaagtcacgtttcggtgacaggtccgcttacgaaaagaggcagagaaaggcgaggatacaaatatgagaaaaataggaccagacgggcagttggaaaggatgatatgcaatgcctgcggtaagaaactggcggtcagacaggggatcgtgttagaaggagctataagcattgaccacacatgggattatttctcggaaaaagacgggcaggtggatcattttgacctgtgtgaagagtgctatgatcagctgacagccacttttaaaataccggtagaaacagaagaacagacagagtatttatagccattctacaaggacaggctcaattttcctcagcacttgattattaagctgcaaatgtgatatgatttggaaagttaaatgtatgatgttcctgcatagaacatgcaacgggaacataatgaaagaaaatgaggaaaaaatatgttagatatatgtttacttggaacaggcggtatgatgcctcttccttaccggtggcttacatccatgatggccaggtgcgcaggcagcaatcttctcattgactgtggagaaggcacccagatcgcgttaaaagaaaaaggatggagcccgaagccgattgatgtgatctgctttacccattaccacgcagaccatatcagcggccttccagggcttcttctgactatgggaaatgcagagcgcacagaaccgctgacactgattggaccaaagggattagagcgtgtggtaaatgctttatgcatgatcgctccggaacttccatttgaccttaaatttattgaactgacagaacaggaagaaagcttacagatcggtccttacatgatcgatgcgtaccgtgtgaaccataaggtgatctgctatggatattcgatccgtattccaagaaaaggccggtttgatgtagaccgtgcaagagagcagatgatccctcagaaattctggagccgtctccagaaaggggagatcatcgaagaagatggacggacatttactccggatatggtactgggagcagacagaagaggcttaaaagttacttactgtacagatacacgcccagttccggtgatcgcacagtatgcaaaagacgcagatctttttatctgtgaaggcatgtacggtgaaaaggaaaaggcagcaaaagcaagggaatataagcatatgaccttttatgaggctgcaaacctggcaaaagaggctcagcctgcacagatgtggctgactcattacagcccgtctcttacaagaccggaagaatatatggaggaagtaaaacagatctttccaagggcaaaggctgccagagatggctggactgtggaactggagtttgacgaggagtaacaggtgcccggagaggacatattccaagagcacatataaaggataaggtggaaatatgaatacaactgcatcagaagatgttttaatactggcaattgaaagctcctgtgatgaaacagcagcttccgttgtgaaaaatggacgtacagtactgtcaaatgtgatctcatcccagatcgcgacccatacggtatatggaggcgtagtgccggagatcgcttccagagagcatataaaggcgatcaactatgtaatagagagggcgctgacagaggcaaatgtgactcttgaggacattacagctatcggtgttacctatggaccgggattggtaggcgcattattagtaggcgtggcagaggcaaaggccattgcttatgctgcccataagccattgatcggcgttcatcatattgagggccatgtatctgccaattttattgaaaatccggatctggagccgccttttgtgtgcctgatcgtatctggtggacatacccatcttgtgatcgtaaaagattacggagagtttgagattattggaaggaccagggatgatgctgcaggtgaagcttttgataaagtagcaagagcagtaggcttaggctatccaggtggtccaaaggtagataaggcagcaaaagagggaaatccacatgctatggaatttccgcgggcaaaagtagcagactctccttatgatttcagtttcagcggcttaaaatctgcagtgctgaactatattaaccatgcaaaaatgacaggggaagagatctatgtgccggatctggtagcctctttccagaatgcagtggtagatgtccttgtaagcagggctattactgcagctaaagaatatggctataagaagctggctattgcaggcggagtggcttccaacagcgctcttcgtgcagctatgaaagaagcctgcgataagaacggtattacattttatcatccatctcctattttttgtaccgataatgcagccatgatcggtgcagcggcttactatgagtataaaaagggaaatcgctccggatgggacttaaatgcagttccaaatttaaaattaggggaaagataacagggaaacaggggtaagaaggaatgaaagaacattgcacagcggtcgtccttgcagcaggcagaggcacccgtatgggaacacagacagcaaaacagtatctggaattacagggtaagcctattcttgtatatgcactggaagtctttgaacagtcagcggtagtggatgatatcctgcttatgacagataaagaccacgtagagtactgtaaaaaagagatctgtgagaaatatggtataaagaaagtgtcagctgtagctccaggcggaaaagaacgctatgagagtgtatggaaggcgctgtgcattttaaaagaacggggacagtctggctttgtgatgatccatgacggtgcaagaccttttattacagatgagatcctgaaacgggtatacgagcaggtgcaggtacaaaaagcctgtgttgttggtatgccggtaaaagataccataaagcttatcaacaaagaaaagcagatcaaagaaagcccggaccgctctcttgtatggcaggcccagactccccaggcttttgagctgtctcttattgtagaggcctttgaacgtcagctgaaggaggattgcagccatatcacagatgatgccatggtagttgaaaaacagatgggggttcctgtttatatggtagagggaagctataataatataaagataaccacaccggaagatctggtcattgctagggcatttttgaatgtttagaagggtctgaaaaagaacctgaaaaagtttttgaaaaaatataaaaaaagtgttgacatatacttccagccatgatattataactgagctgctgatgaacagcaagaaagtaagaaaaaacaagaaaaaataaattaaaaaaactcttgacaaaacgtttcttatcttgtataatcgaaaagcacgtttggagagatatcgaagcggtcataacgaggcggtcttgaaaaccgtttgtccgaaagggcgcgtgggttcgaatcccactctctccgtttagggcaaacaaaacaaactgcccttacaaataaatatttgtttatgaatcaaccaagcagaagtacccaagtggttgaaggggctcccctggaaagggagtaggtcgttagtagcggcgcgagggttcaaatccctccttctgcgttacgaaacgcaagtttcgatgtacctttaaaattaaagactgaataatacacaaaccctgaaaattctaaaataaaaggtctggtttagacctttgaattgagaaaattcagaacaaaaaccaagtaaaacgggttagataaattagccaagctaagtagtcttaaccaagtatcaactttttaacatgagagttt

SEQ ID NO: 3541 - DNA, 97442 bp, Unknown
  gut microbiota DNA sequence
aagaaatccaaaaacttagtaaacaatctcgagaaaaatcataaaagtctatcatccatatctgattcagaaaaaagactatatagtaaaacgaaaaggcaccgctgaaaaacccaggtagaataaggctttcagcggtgttttgataaatttgactgtcaaagatgggattatacactatttttgttaccactacatcatcttataacgattttaatccaaaaagtaacctctccatgtacagtaatattttcttccattgattaccctgcatttttatggtaccatcagaactgttaaaattaaaaaaatgaagaaagcgtatttttatgaaagacttaacaaagggttctccctcaaaagtaatgatctcctttgccattcctgtggctcttggaaatattttccagttgtgttacagtctggctgacacccgcgtggtaggcagtaccttaggcgaagctgctctggcggctgtaggagctactacttctatcagcactttatttatcggatttctgtccggacttaccaatggttttgcccttctcattgcccgccagtttggtgccggggataaaaaaggcgtaacccgatatggcgccggatgtctgctgttaggatgcatcacatctgtgcttcttaccttcatctgcgtaagcagtcttccctttattttacgactgcttaatgtacctgaagcattaatgggccagtccaccgcctacatacgtgctgttcttttaggacttttagccactatgctttataatggctgcgcatctatcctgcgggctgtgggcgataccactgcgccccttttattccttctgtttgcagcagcactaaatgtagccctggacctgcttttcattttaaagtttggttttggtgttgcaggcgctgcctgggccaccgtattgtcccagtcactttccgccatcataagtctggtctacatgtttaagagatatcctgttttccgatttaaaccagatgattttaaacttaaactgcgggaaataaaagctttatatacctccggcctttccatggcagccatgatgtctctggtgtttttcggaaccttatcccttcaatgtgccatcaatacctttggtcaggatattatcgttgcacacacagccgcccgcaagatcacggaatttttcatgcttccattctctgttatgggcgttaccatggcaacctactgcgggcagaatatgggagcaggacgtaaagaccggatccgcacaggtatccgccaggctctgatccttacctggatctggtcccttggaatgatccttttaagctacacagttgccccatggcttatatggctggtaacaggatctaaaaatccggctgtcctgtctaatgcaacctggtatttaaaaacggacactctcttttattttgctcctgctgccatttccattttaagaaacgggcttcagggaatgggcgaccacattactcctgtattttccagtatgatcgaactcataggaaaagtgatctgtgctttcctccttgcttgcatcttccagtactggggcattattatggccgaacctatcgtatggatcttaatggtcattccacttattataaaagccagaaagctgctgtgacatctgatcacaacagccttccggctttttcttttttttatgtatttttctgttatgtactgctttatttaatgatctcttctgctctttccagtgcagcagtgatattcgggcagaaattctcttcacctgcaagagcaacaaatccggcctttttcattaccttcataggctgctcatttacatgggagaatacaatggtcacgcccttgctttcgcaggtctttgtaagtgcagtcagggcattcattgctgtgctgtccagtgcaggaacggctctcatacgcagtaccaggcactttgcgctctcttccactacaatgtgctcaatggcatcagaagcgccaaagaacagagggccgcttacttcgtaaacacggatctcagccggaagcttgcgcaggttttcattaacagctacagtatcatcatctgtatatacccagctttctgcctttgtctcttcgctcattcttttgatgaacagcagacatgcaaggatcatacctatttcaatagccacgaccaggtcaaataatacagtcagtacaaaagttactaccagaaccaggatatcgctctttggagctgtttttactaactgtaagaaggtacgccactggcacatattataagctacgataaacaggatcgctgcaatggtaggcattgggatcatacctgcatatggcatcagcacaactagtacgatcaccagggtaatagagtggaccataccagcaactggtgtatggccgccgtttttaatgtttgctgctgtacgtgcaatggcgcctgtagccggaataccgccaaataatgcagaagcaatgtttcctgcgccctgtgctactaattccatatcagaacggtgttttccattgatcatgccgtctgcaaccacacaggaaagcagggactcaatagctgccaggatagcaatggtaaacgcatttggaatagccgcctgcacgatctcaaagttcactgtcggcaggtggaaagatggaagtgcattgctgatagtgtacagatttccaatggtagaaacctttaaaggcaggaattttaccataagaataccaacgataaccgcgatcagggaacctgggatcttcttaaagatataaggagaaataatcaggatcgccagacttacagctcctacgatcagtgccgcaggattaacagttccaatattttccagaaatgctgccagcttttccatggtctcgatcggacggacaccttccggataggtcacaccaaaaaagtcctttaactgtccgatgacaatggtaacagcgataccggatgtaaaaccggttgtaatggtgtacggaataaatttgatcaggcttccgaaacggcagatgcccatcaagatcaggaatacacctgcaagaaccgttgcgatcacaagaccgtccattccgtctcttgctacgatacctgctacaatggtagcaaatgctgctgtcggtccggcgatctgtacgctgctgccgcctaatgcggagataacgaaaccagctacgatagccgtaaaaatacctgcctcaggacctacgccagatgccagtgccagagcgatagacagaggaagcgcgatgatcgctacgataatacctgctgtcacgtcttttacaaactgggatttgtcataggactttaaggctgttaataacatgggttttaagttgctcattttaccttcgtcctttcattttcctttgtttctgcttttttattatttcatactcacgatccccgcgctttcgcgctccactgcctgctgacgcaggcggctcgttcgttaatgacccaagaaaaacaaatgtctgctgcgcagccgcttgtttttcttccccggccattatatcataaagaaaatgttaagaaaccattattttccatgtttttattaaaatacatttcccctgcttcacgcttcatctgcaaaagccagctcttccacagtcatcaaatatggcacatgcttatcacatactcatcacatactcatccggaagataattaaaaaactccttgctttcatctccattttgttctatactactcaggtctgtaacttccagatacgattgacagttcgagaccatcctgtcacaaaataaaactagggacaacaaatattaactatgatcaattgttgttgtgattatattttggaggtgaacaaacatggaaaatcaaacttttactaacgtccggaaacttacaacttccggcattgtgattgcgctttatgttgttattttatttatgacacaaagtttttctttcggggcttatcagatccgtattgtaacttctttatatgccctttcttatctttttccgttcctggttatcccgcttggtctcgctaatttcatcgcaaatatgcttggaggtttcggcatcattgacatggtcggaggttttatcgtcggcattgtaacatctggtattgtcatgctgatcaaaaaattccacctgccgcgttttatgatctttttcccgatcacgcttgtaccgggccttggtgtcgcactatggctgtcacctatggtccacatgccttatggggcactggcacttagcctgtgtatcgggcaaacagtacctgctgtatgcggcgtagcactgtccaaggcacttgaacaggtattttacccaaaacattctataagcaacgcatagggggatatgaaaatgactggaagaaacgaaaaagaactggaaggcgtcagccttttgggaaaccaaaccaatgtatacagggcagactatgctccggaagtcctggaaacttttcccaataaacacccagaaaatgattattttgtaaagtttaactgtcctgaatttaccagcctttgtccaaaaaccggacagcctgattttgccacgatctatatttcatacgttcccggtgaacgcatggtggagagtaaatccttgaaattgtatctgttcagtttccgcaatcatggtgactttcatgaagattgtgtcaatattattatgaaagacctgatccgcctgatggacccaaaatatattgaagtctggggaaaattcacccctcgcggcggtatatccattgatccctactgtaactatggaaaaaaagatacattatgggaaaaagtagcttttgaccggctgacacaccacgatatgtatccggaaaagatcgataatcgttagccctctcccccactccgcaaaggaaggctttccgatacacataaactgccataccccacccgcgcatttggccagatatcatatcccggtaaatgtctggcaccgcggatgaggcaggcttttactttttcaccgtatagaaacggatcgtttccgttgatgatcccccattgcatcaaaagggctgccgctccggtaacaaagggcgctgcgaaagatgttcctgtaacagcttcgtagccgcccctgtttccggctgtgataatattcacccccggagccaccagatctggttttacctgattggtctgccgggtaaaaccacggcctgagaagtcagcataagctcttgtgcgaaagtcataggcgcctgcagaaataatttttctggctgtagagggaatagtcagtgtagtttccggggtactttttaaaaagcgggtatcattatttaatgcagctttggaaggaagccataaatcaaactgaccggtaatgatcctttccggtgtcaggataaactgccagatgccgctgtctatataatctcctgctggtataaaatcaaaatatacctcctgcgccatgctgtaaggagaaggttttccataataactcaggatctctgtattttcacttctaaaacgctgtttctccagattttcctgtaaagttcccataatagcacctgaaggcgatcttagggaaatagaaaatatatctgcataggatttccacaactgcaccccaaaactattttcaaaggctgatacagacagctctatgacctgctctcttcccatttccagcagaccgcctgtatgacctgctccggctccctcatttccggtccccgctacgatcacatttctgccatatcctgtcatatcatctaaaaaggtttctaaaagactggttccgtcgtgagaaccgtatgtatttccaaagcttaaatttactgccaccggccgtcccagctgtctggctgtgcgaagaacgaaatctactgcttccattaactgggtagttctgggaaaattatctgcaagagggatacccagttttaccaccatcagctcactttcacaggctacaccacggtatagcccgctgcttcctctgccatttcctgctgcaatagcagctactgccgttccatggccacttgtatccgcagaaggaacaatctgcagtgccgcagccctgtttcgccccccagaaccttcccggtatgctgacagagcctcatttatctcctctttcgtgtatacaatatcccggccctgatcccatagatacaggatgcggctggtgccgtctggattttgaaaatccggatgaaggtaatcaataccggaatcgataatagcaatgagaacgccttttccagtcagatccgttggcagcttagtctctgctgatactctttccgtcacagtgcccccgtccataccaaatatattttctaaagggtctgaatttgcattttctccaccaatcccttgctgcacgtccaataaacaagaggccgctcttgcctgatttacagcaaagaacagcctcttaggtttttctatatattcaatttccggtaagtttgtaacaaagtccaccagatattccggcaccttcagtataccataaccacttaacaattcccgtacctggatgccccgttcccgcaatccactaagatcaccaaaatacttaacaatcagctcccaggtccgttcttcacggtcaaagccggtttccagactttcagaacgcatcctctcttcttctgatacacttaaagacagatttaaaaggttttccctcttctggtctgtattggctgcaattgccatatctgttatattttcctgctttcttacgccctttccctaatacttatgcatcaaaacatagttaatatgacattttcagatctgtcttacttcaaaaatccattaatgatctgattctctgcctcttcctcagtcagtcccaatgtcatcagtttgatcagctgctcaccggcaatctttccgatagctgcctcatggatcaaagctgcatctacgtcgtttgcttccagtcccggaactgccaggatctttgcatcgtccatgataatggcgtcacattctgtatgaccgctgcactttgcatttcctgcaatgctggcacggaaagtctgtttggaggttcccttagcaacggaacgggatactacatcagcactggagccttcaccatttaactctacctcatagatactttcagccacctgggccccatgagtgagaagacgctctcttactaccagtctggcacctgctgccagtttcgctgtattggtccggatggtagagtcaacacccttgatctggaccatctccatttccatctggctgttttcttccatatatacttctgttcccggattcagaacacgttttcctgtaccgtcaccttcaccgtaatgcttttctacgtatttaactttcgcattctttccaatgaaaaatctgtggatgccgtcatgctcagagtcctgatcgccacagttgtggataccacagcctgctacgatcactacatcagagtcttcgccaatgtagaaatcattgtaaaccatttcttttaatccgctggcacttaccactaccggaatatggacactttcatgctttgttcccggcttgatcttaatatcaattcccggtttatctgttttagttgtaatatcaatgttggctgtggtacttcttccagccattttcccgttagcacggatattgtaagcaccttccggcactccgtgaaggtcagctacttctgcaagaagtctctcctggatctgatccatcattcctgatcctcctttccgtcatttcccgtaaaaccggaacaaacgcctactgctgctgcggttcccataatttcaggcatgatctcttctctggttccctgttttacgatcttgccatctgcgatcacaacgatctcatctgcaatatttaaaatacgctcctgatgggaaataatgagaatggagccattattattctttctcatacgctcaaatacctggatcaggttctggaagctccaaagatcgatccccgcttccggttcgtcaaaaacagaaagctttgcatttcttgcaataacagtagcgatctcaattctctttaattcaccaccggaaagacttgcgttaatctcacggttgatataatcttttgcacaaagtcctacctcggacaaatactgacaggcctgcgctgctgacagcttctttcctgatgccagacgcagaagatccaatacctgaacacctttaaaacggactggctgctggaaagcaaaactgatgcccatccttgctctttccgtaatgttcttctctgtaatatcttctccgtcaaagaaaatctgaccgccggtcgggcgttcgatccccatgatcagctttgctgtggtggattttccacctccgtttggtcctgtaatgaccacaaatttgccatcattcaccttcaggctgatatctttgatgattcctttttctcccttgtcatcatttacttcaaaggagagatgttttagttccagcatctgctgtccccccacctttctttattattccaaataatagttttccgtttatcttctccaaaatatccggaaagcaaaaacaggaagccagtttcctgacctcctgctcatctcctgcagaagaagggagtcgaaccctcaaggtattactaccacacggacctgaaccgtgcgcgtctgccaattccgccacttctgcatctctgcgttgctattttctcaagcaacgtagatgattatatcgtaaaacatattgtttgtcaacagtaattttgaattttttgaaaagtggaaggttttgtaaaaaatataaaatttaaaccacctgctgaccggtcagttcgtatcggcttttacaaagtttcgataaaccgtccgaaatcaattcttcccttttttgtattcttatatacaccggcgcattccaaaacctggacaaacacttttccaatttctttctgcagaatggcatggatgttatcctctgttatttcataggatccaagccaggaatccacccagtctgcatgcttttcgatctgcggattgctgcggacatcctgcttttcaaggatatattgttccaaaagcgccatttcctttttcagccgcgccggcaaaacagccagtcccattacttcgatcaggccgatgttttccttctttatatggtgaaggtctgcagacggatgatatacaccccacgggcactcatccgttgtaacattgtttcgaagtaccagatccagttcatacagatttccatgcattcttgcgatcggagtaatcgtattgtgcggtgttccgtctgtttcactaaaaatgaaagcttccttatcggtatatctgcgccatgcagtaaggatatgatctgctgccagagtaatcctttctgtatcggttcctcttaatcggataacagacatgggccatctcacgataccggctgtcagatcctcatagcccggaatgacaaattcactctcataaggtgccttggccattgcaaagacatagccgccaccctgaaaatgatcatggcttaaaatggaaccgccgacaatcggaaggtccgcgttggagccggccgtatagtgcggaaacaactttacaaattccaatagttttctaaatacagcctggtcaatcttcattggccggtgcgcttcattgaaaatgatgcagtgttcattgtagtaaacatacggagaatactgtaggaaatactgttctgcgcccagtttgatcgggatcacccggtggttctgccttgccggatgagaaagatttcctgcaaacccttcgttctctttgcataagaggcagcttggatatccggtactttttactgcgccggcccgggcaatgtctctcggatctttttccggcttagacaggttaatggtaatatctatcggaccatactcggtatccgttacccatttttcatcttttgcgatgcggtctgtacggatataatttgtatcctggctcaatttatagaaataatctgtggccttttttctgtcttcctggtaaaggctttgaaacctggatctgacaacagacggcagcggagttaacagccccatgatcctggtatcaaatagatctttccaagcgatggtatcttcttccagaattcccttctgatgagcataagagaccatatcttccagaatttcagctaatggccggcttttcaggatttcttcttcatgaaactccgaaagacgaaagaggtctaataactgatttgtcacaaaaatctgatcatcctccgataccagaccacattttaagccataagccacaagttcattgatctgtgtattgatcatagcaatcttccccctttaatcagctttgtacccatgtggatgggcctgatgccatttccaggctgtttcaatgattactctcagatctgcatactgcggtttccatcccaggataccttttgctcttccactggaagcaatcagagttgatggatctcctgctcttcgtgcttcttcctttgcagggatcggatgtccggttacttctctggcagtttccacaacctctttcacagtaaagccgactccgtttccaaggttaaagatatcgctctttccgccgtttcgcagatagttcatagccagaatatgtgcctgagcgaggtcattgacatggatataatcccttacgcaggtgccatcttttgtatcataatccgtaccgaaaatggaaatatactctctctggtggttcggtacctgaagaatcagcgggatcagatgtgtttcaggattatgagcctcaccaatttttccattcggatgcgcgccacaggcattaaagtagcgcagggaaacatatcttaaattgtgtgcgatggaggtccagtggaacattttttccatggacagcttcgtttcgccatagcagttggtcggaacagtcggatcggtttccaggatcggaatgctctcaggctctccatacgttgccgctgtggacgaaaagacgatcttgtcaattccatgaaccaccatgctctccaaaagcacctcggtaccgcataaattattactgtaatacttaagcgggtccttcatgctttccccaacctgggaacttgctgcaaagtgaatgacaccgtcgatatcttctttttcaaatacagaatccataaaagctctgtcccggatatcgccctggtaaaatttagcttctggatgaacagctttcctaaatccagattgtcagattaaaatttgcatagaaataatcacctaaatatacatgcttcccgtaagacatatggagcccatcttcgatatacacatgattcccacaagaaccaagcagttcctttaaaatttttagctgccgatcctgatctcccggtctgcagtgattataatcaaacatcaattctttgcagtctttccgctcatttttcaggcgttcttctatctcctgattgaccggatctacatgcccggattcataaaacagcatgcctgcttttatacgttcttccagattcatttttcattccccatacaatacacagatatttccatttcgtttcacacgatggttatttttccggttgcgcggaggcttagcagatggcaaaggaataggaaataacattttctgcattgatgcggtatgcttcctccacgtcacttccccagctgtcaattccaccaacacctcttactgcgccacaaacgcacagaacagtccttcttgccggcggcagttcttcatagtgtgttgcgttttcaatctcttctgctgtatatggaaggcaggaaaaagcaaacggctcgtctgttttttcaatttttaagatctgcaaagaataatcccttctgctgttatcaagactcgtatatctcgtaacctccagccagtccgtatccatatgcattccacaatcctgcggaacaaggtatggggtaaggcttaaatcactcacctgatataccccttttacagcgcctgctttccggtccggataggtttctccggataagccctcatacatgtagctgtctgcaagtgtcggcataatgaatctcatgccaaacacaggaagctccgggagaccctttactccgtggtattctacatccaccctgatttttccgtttccggtcacagtatagcttaccagaactgtcgcggaaggattgctgatggtcttataggtgaattttacaatgatctcatctgcagatacgtcgccctcatagatattattgtccggagcatactgcttctgcatttcaccgtccatgatgacttcgacattctgacagtcgataaacgtatctgctgccatccagctgccgcttttaatatggaatttgcttccccggtcgttatctgtcagtgctctccagaaggtcggcttcgggcaacggtacagccattcatagccgttttttacaatagactccagaccgccctgagcataagagaacgtatagtcgaacccttttccgtgtacaccgagcacatagtcaccataaaccactctcaatttcccattatctgtataaaccataataatacctcacttcctgcatagccggcttctccacacggtttgcaaatacaattccatctcctgaaaattcataatcggaaggtctgtcatcaaagtctccaccatagcggagcacttctttccccgtaacttcatcctttacataaagtgcttgatcaataaagtcccagataaatccaccatggtacatgtcatatttatcaatcaggtgcatgtaggtgccaagtccacccatggagtttcccatgtcatgcatgaactcacataagaggtaaggcttttttggatcattgtccaaatattcttcgatctcatacggctttgcatacatacggctttccacatcggaaattgtgtcttcataagctctgttatagaaggagctttcataatggatcaggcggccgtcttgtttctctttataataggtgttcatggcctcgatatcatccccagcataggactcatttcccagggaccagaataaaatggcggtatggtttttaaacgtttcaaagttgcttctggctctgtctaccacagcctctttccactgcgggattgatcccggcacgttgcaggaaggttcgatcgcaccaagcttctggaaggttccgtggctttctaagttgttttcagccatcatatagattcctgctgcgtcgcacatataataccacgggatctgatccggataatggcaggtgcgcacggcattgatattatttcttaagatgcattcaatatcggatttcatttcgttcatactgatgcagcggcctgttttagggctccactcgtgacggttcacaccggtcaggaccaggcgtttcccatttaaatggatcaccttgtcgatcacatcgatccgtctaaagccgatgtcatacggtactacttcagccagatttccgctttcatccgtcagctccacatatgcatggtagagatacgggtgatggttgtcccaggcttttacctgcgcatcatctgtctgaatttcttcagtgtagattccgtttttctcctgcagggcagcagatttttccagcacaacactgccttcctgatcctttaacacaaaccgggcattgattttacggttctctggtgcggatactttcagatttacggataatttgccgctcgcattatccttatacaattccgggcggaaccacacatcctccagatggatctcaggaaccgcacgcagggtaacatttctgaaaattccaaaaaagcggaagaaatcctgatcttccaggaatgctgccgtactcatcttgtgcacctgtaccgccagtacattgcccttttcccggatgaatggcgtcagatcaaactcggaaggagtaaagctatcctctgcatatcctacgaactgaccgttcagccacagatacattgcctcttccacgccttcaaagcagatacggactctcttagagcacagctccggatccagatcaaagcgtttgatataggaacctaccggattatactcagcttcgctgaacattccggctccgtctccggtgctctccatgctgtaggcgcctctgcggtattcttttccctcccatgggtacatggtattgatgtagcggatcttatcatatccagccagttcaatatggcccggcaccatgatcttatcaaagtttttcgcatcaaaatcctcttcatagaagttttccggtctgctcttaacattcttactgaaaacaaattcccactgtccatttaaagactggatcagtgcgttttccttcttttccagtgcttcatagctttcataataagtatgatcactgtgcgcttccagctgatttacccggaatacttccggattatccaaccatttcatatctgcgttcatgttctatcttctccttttctaaaataagcccctaaagaaaactttagaggctattgatttatgattcctgcatattttcaattaattcgcggtttgcaccctccacatttaagaaggaaaggataaccgtaatgatgatatcaaagataaatggcagccagaggtacataaagtacatcattttgatacagctggccggctgaacagcattatccatattgatatatccactgatgtcaagcaaccatccggaaagagcaataccaataccgccgccaagttttatacccatggaagtgcatgagaacatggaaccatcaatacgttttccgctctttaaataggtgtattcggaacactgtgcaataactgcactcatatcaccctgccaagggccttcacctaaagaggtcattgcgataaataatagcatcagcggaatacttcccatataacctgcaaatactaccagcagacgggaaaagcttgcaaatacatagctgtatttattcagcttgtacattccattcgcctttgctaccagcattggtgtaatcgccagggcaataatcagagggatattgttggcccatgagaacacaccgaataagttcttatttaacagaacataggtcataaagaaaattcccacattaaccattgccgcacgaagctgctgtaaaatgtaaatcacacagatcatggaaaaatacttgtttgcaaacaacagctttacagtctgcttgaaagtaagcttgtcatcctcaagtcccgtagaactattggattttaattcttcttccggaagttcttttacggaaaatacagcaagtgtattggtaatgataccgatcacacagtaaatgagtgcaatgattctccatgctgctgcaccgttgccgagaagctcaactgctcctacagtaatagactgaattgcaaggtttgtagcaaaggaaaacatgaaacggaaagaacccatctgcactcgttctttactgttctttgttaccagagaagtcagtgctgcatatgcgatgttatttgccgtatagaatactgcgtttaacagagtataacaaataaagaaccaggcatactgcgcggttttacccatattagtagggatcgcaaaaactccgtagagcgtgatagcacagccaaagaaaccataaaacatccagggtcttgccttacccattttgctctttgtccggtcgatcatggttccaaaaaaaatatccgttataccatcaaataatttggatactgcaattaatgtgccaacgattcctgaatttaagccaattgtatttgtcaggtaaatcatgacaaaagatgacaggaacgcataaactacgtttcctgcaatatcaccgcttccgtatcccactttgttatgccatttcaggtatgtcttctcttccattttaatccccttttcatataataatctttgtcatcctgccttttcaatacgttgtaactactatacaaaaatgcgtgggaaaactccatatcttttatgagacagaatatgcacaaaatgataggggttacatactctcccaccacttagccaacacttgaagtgtgagtttttcgttcgattgccctatagggcaaagcataagcgagctatccccgtgtgtcccacagttttattagaatgatattattggaatttttattgcaaagatcaggaaattttcttttctatatccggcatcattccagatattcgaataccttccctgcatatattgattgctgcgttttgatcccggtccattcgatttccgcatgcacactcataaatgcgatcactcagctgcagatcttcttttatgtttccacagcagctgcaggttttggaactgggataccagcggtcaatacggacccgtttcttcccggcacgttccattttatatgccaaaaaatccgtgaacattccccggctattgtcatgaacactctttccaaaacacatatcctggcttatttctttcatattcagatcttccatgcacacgatatcataggaattggctatcttcctcgactccttatgcaaaaaatcctttcgctgatgtgcgatatgggtatggatccgtgccactttcttcttttgctttttataacggctacttcttagttcgcagtggctcagtttacgctgctcccttgccagcttcttctgagcttttgagaaaaaatgaggatatgctgcacgatttccattggaatccacatataactccttcatggaaaaatcaagaccaatcgcggattcagctttcctgatttcgttcaccggttcctcgcaggaatataacaaagcaacatagtatcgttcatctgcttcctgagtgatggttgcacctttcaactggtaaccttcctcaatcttccgatgctgtctgatgcggacccagccagcttttggaagttttaaccttccattctgtaagacggtgtttccattcacacaattggttgtatagctttttactggcttcttttttgatctgaactttggaaagcctacagaaacatcatgaaagaaatgatgcatctgtgcattacacaatgccagactgtctacttccttcagccacggaaactccgacttatatctggccggtgtcacgcttaagttttttcccattttctcatagtaggcttttttctctgcaaacgggagtcaaaaaactcctcagaagcccccacttcaaatttcatcagaaataaaatgggtataccatgacccaaataggattcattcttgttttccgcaataaagctacacatataataaaaattaaaaccataacccattttgttttaacaaaggtaaccgtaccatttccccaaaaagccgtcataagaatcaaaattcccgctgacgctatcattgctactactgcagggcgaagtgaatgcaatacctcctgcatcatatccacgcttctatactttagatacaattttgctaacacggttacaataatacaggacggcaaaatgcatccaaacgtaacgaccactgccccgagtacacctgcaatcttgagtcctacaaaaattgccgaattaactgcaataggtccgggggtcatctgcgatattgtaataagatctgtaaattctgacatggtaagccacctatggttagtaactacctgactctgaatcaacggcatagctgcatatccaccgccaaaactgaatattccgacctgaataaagctcaagaataattgtaaatacatcattttccgcttctcctttttactggaagccggggcacatgccccggccagaacctacccgttgatgagttcatgctctgcaacatatttcaccatgtaatcatcaatcaggcgattttgcttttgaaaagcatacatgagcgtcttttcgcaaacacggttaatcattcttgggataccagttgaaatgcgatagatctcatcaagtgctttctcagtaaatatcgtttgcgaacatcctgcatactccagatagctgtttacgtactgttctgtttcagcgcgatccagatgcggcagtgtacagtacatgtcaattcgttgccggattgcggagtacttttgaagtttcagcttgttgtcccagagttctgtctgaccgaccagcaccacaaccatcggactcatggaatcaaaacggtaattcagcagaaaacggaattcttccagcgtttctttttctaacagatgtgcctcatcaagaatgcagactagcttttgatgacggacaccacgaatgatttcaatctcctgttgaagttgccgtttggaatcaccgcggtaaaagcgggattccaggccaagctgatccaacagacctttgtagaaccatctgggtgtcagctttgaatctgacagatacagtacgatatacttttctttaggaagttcttcgtaaaaccgtcggatcaaagtggattttccacatccgggttctgctgttactacggcaaagagttgtcggtccgcagcgtaacagagcctgccaagagtttctctcatggcctggctttcgaacagctgatccgctggcacatttctggtgaagggggtatgcttcatatcaaagaactgttcatacatggcttgccttctccttcctcagtgatgcataggaaatggcatcagccagtcgttctttcgattcctgatgtttcttttccagcgcatccagaagacgcgatgtttccggctgtactggaagcatacttgctggtattacctgttcctgattgcaataagaacttatctgcagcggagtggcggtaaatggcacaatgccgggataccgtattgtcagcgtatctggagatactggatcataagaaatctctacggtatgtccaatcaaagctggggttgtttcatacttccgtccatgaaaactgatacatccgcctttgtcaacttttcggtttgcgtgatgcaaaaaagcttccgcaacaacagacgcatcaaggaaggtcagtggtctggtatcccggttgaattcctgcaaaggagtaatgccttctggaggaatttctactcccatgctggcgtagtattcggcaatggcagcatgactatccttgtgataatactcgtccaggtaaacactccagagagcattaagttcttcaagtgtacagacttttttgagttttacctcgcgcaggaatgcatctactacctgatggaacttttcgatgtagatgaaagcctattctccaaaaataaagttacggttgtaaacttctggttcagcggatgcaagccttgcgttgaagaactttctaaactgaatgaattaaatgataaaattaaaaaaatgggcggcgaagttgttggtatcaatacagacacattagatgataatcaggatgggatcaaagaagcgaaagacatcctcaagtcccaaggagtttcctacaaaaacttgactttcgcttccgattcaacagttggaaaatatgcaggaaacattatagcatttccaccaacagttctcgtagataaaagcggaaatatcattagcgaacctttcatgggcggaatcgatgatcaagcaaactacgagcaattaatgaaacaaattcagtccatacttgatcagaaataattcatttactgaagatttatgcttttttatgttgtatatgaatgcttgattccgcttatcagaaagcgcgtgaaataaacgatgaactggaagagcttttaaaggatactttaacgaattaactttcgaaagagttccggtataaaaacggggagttttccctccccaaaaaattttttaaacttacacaaaaaacttgacaaacccatggtatacgttatgtggaacaggaagaaagctataccttcttgaatcaggataaaatgccggtctatggcgattctgaatatgaactactcggtaactaagttaccagagcatctgaaatctggcgggataccgccttttttcagggtgcgtccatgacaccactattgcttgcctttcggctatacagctacttttattatttctggattttttagtccggccggatattgaccgatgttctgcttgaaaattaatatggcctccttcctggttttcatgaccacactccagaaaaaacacaatcaacatcaaacactcccacgcagattcaaacccatatcggagttggatatcgaatgctacgactaaaagttcttcatcgttgaccatgccgttcacttcccttcggcctcatcatcctggcatagaaagccatttgccggcaatctatcttacggatgcatagtcgtcagactatcagcatcaggaagtaatttcaaatcctaaatatctcgttccctgaaaacttaagtttccctggtttctctctgccagcagtccatattctgatctactcaccctaagttccatccggtcaccgctctccacctgaaaagtcacatagtaggaagttgaggtggttgtgctaaaaccatgggcacctgtaggatcccccgcatttgcatgttgctgctgagtaacctgggtacgtttggccacaaccgttgccgacacggtaagcttgggtgaatggttattcttattccatgtagatatattttttacgatcagaaaaagtatcacagcacatacgcaaacaaataccatctgaaacatgatcattacaaatgaaaaaaacacagcatatctcctctttctatgttcctgcagcttattccatctcccgcattctgtttcgatactgctgtggggagtatcccttcttactgcggaatgcacggctgaaataggatggattgctgtatcctacaatctgcgaaatttcattgactgaataagccgttgtttctaataaaatttgtgcattcatgatacgcactgatgtaataaactgtatgggtgtttcccctgtatattttttaaagttgcgaatgaaccagcttgtgctcattccctttgaatatgcatattctttaacattaatctccagattgtatgaggaactgaaataagaaatagccacttccatttcgcgatccatatattcatccttcaggacatgctctcttgtcagttcccgttcaaattcgatcaaaagaagctgcagcaaatgaacaagcgtctcttcgtactcttcctggcacttttgcagttccaggataatcctcttaaaaaggcgctcatactctggtgatgttcctacaggaaagattctcttcttatccgcgaatccataccttctgagaagattctttatattgcctccagtgaaatggatccaatacacctcagtcttatcttttccatagtattcatacttttgaagttccttcggtcgaaacaacacgatattgccggccgggacaatcgtttcattttctggagaatcaaaatgaaagtatccctttcctgaagcaatataaatgatctgataatccagacggcctcgtggccgatacgttggcagtttcggatatgttgataagcggtaacagccacagctgccaacaacgagtggctgccgtttatccttaaaatcctggtgggactggttcagatacccagtattcatatacatttgcataccccctttgggatagtatatcattttgtgcatatttcgtctatttctattcatgtacatgcacagcataattctgtaaaatatccttatacgattgcagaactatataatccaccttcttttgaagaaggcccacagcacatcaggaggggttaaccatgatgataccgcgttattatgaagatttaagcatactgcatgataacacaatgccgatgaggtcctattatattccagcatcgcagaaaatgaacacgctgatcgaacaccgggaagattccgaccgctttcagttattaaatggagtctggaaattccagtattataaaagtgtttatgacctaaaagaagcattttacaggaccagctttaatacaaaagattttgatgacattactgttcccggagtctggcagattgccggatatgattcaccccagtacaccaacatccgctacccttttccatttgatccgccttatctcccgcaggatattccctgtggagcctacgtccgaaaatttacttaccatgaaaatatcgatgcgccaagaatttatctgaattttgaaggagttgacagctgcttttttgtctggctcaatggaaagtataccggctacagccaggtccctcatgcaaccgcagaatttgatgttacagaatttctggaagagggagaaaataccattgcagttctggtcttaaaatggtgcgatggctcatatctggaagaccaggacaaatttcgcatgaacggcattttccgggatgtttacctcttaaaacgcccagagcgggccatctgggattatcatatcactacccagatcaaggaaaatactgcaaaggtcaaactgaatgtgacctttgatttttcaatcccggtctctgttaccattgaagaccaagccagagccgtagttgctaccggcacaatctcagatgacggatccatagaatttaagattccaaatcctactctgtggaatacagagcatccatatctttacactctcaccctacaaagcagttatgaaaccatcgtcgattacattgctcttaggaccattgaaatccgtgataaagtaatttacttcaacggacaaaaaatcaaattccggggtgtaaaccgccacgattccgatccagaaaccggttttaccgttagtgtgccacagatcaaaaaggacctgtctctgatgaagcagcacaatttcaattccatacgctccagccattatccaaatgccccttacttctatcagatgtgcgatctatatggttttatggtcattgaagaagcagatatcgaagcacatggcccatacatgctgtaccggaaagaagataccaattataaccgtttcaagcgctggaatgaaaaaatcgcggatgatccaatctgggaggaatcaatccttgaccgtgttcagcatatggtccagcgcgataagaaccgcttctgtatcgtgatgtggtccataggtaatgaaagtgcgtatggatgtaattttgaaaaagcgctgcggtggaccaaaaaatttgatccataccggctcacccaatacgaaagcgccagataccgcaattatgacgtgacctacgattattccaatctggacctgtacagccgtatgtatccggccatgaacgaaatcgaagaatatcttgaagaagacggaagcaaaccattccttcttgtggaatactgccatgccatgggaaacggccctggcgatttagaggattatttccagctcatccagaaagacgaccgtatgtgcggaggatttgtctgggaatggtgtgatcatgccattgcccacggaaaaacggaaagcggtaaaaccatttattattatggtggcgaccacgatgaagaacttcacgatggaaatttttgtatggatggcctggtattcccagaccgtactcctcatactgggattttagaatacaaaaatgtttaccgaccagtgcgggttgtctcttatgatcaggaaactggaaaactggttttacataattacctggattttgatgatctaaaagattatctggatattcgctttgaggtaatcaaggacgggctgtccaccgtgcaaaaaggaaaactttctccattctctgtaatgccacatacagacggcgtgaccgagttaaacgtaaccattcccagcgaaggaaaaatctatttgaaactgatataccgtttaaagaaggaaacacctttcctgaagaaaaatttcattcttggatttgatgagatcctgcttaaaaatgaagacggaagaaaccagatggctttaagctggcttgaaaaaacggaccaggtaaaagaaatccgggtacatgaaacagacacagaagtgactataaactcaaaagatttcacttataccctggacagaaggaccggtctttttgaacagatgcagttttccggccgcaactatcttatccatccaatggaactaaatatctggagagcccctacggataatgatatgtacctgaagtccgaatggaaaagagcacgctatgataaagcatacaccagggcctacactgtagaaaccattcagaatatgcatggtatctttatcgtttctcacgttgctgttgttgctgactctattcaaaaaatcctggatatcacgatcaactggaagattgacaacgatggaaaactcagttctgtaatgtatgtggaaaaagatgatgaattcccggtactgccaaggtttggcatccggatgtttttagataaaagactgaaaaatgtgagtttttatggtatggggccacaggaaagctatcgtgataagcaccaaggagcttaccatgccttattccgtaccaaaataaacgatttgcatgaagattatatccggcctcaggaaaatggatcccattttgattgtgattatgtggtgttctcagcatcccagtttggtattgctgcagcagcagaaaagccattctccttcaatgcatcctgctacacacaggagaagttggaggacactgcgcataactatgaactggaggaatccgacagcatcgtattctgtcttgactatgcattaaatggcattggctccaacagctgtggtcctgctcttctggaaaaatatcagtttgatgatacttctttccagctagaatttactttggttccattttccaaaggctaaaaatgattattttctgattatagggcattgttatttcggattaccgatacagtaacagtgtcccttttacgcacgatataaatgattgaaaaaatctgcataaaacattaaaagctcgttgatataattatgaattctattcatcctaaatatcccctttctttttgtttgcaggttcattataaaaccatttcactttgcgtgcttgtcaaatcgcagtaactattagccaaatcttgcatcagggcgatacgcttcttatcttaatttaggagaattttgaaatgcatttagtatacgaaaatacaaaggaagagattattgcaataaaaaagacaccggtccatcggccaccgcatcttcataatgcgctggaaattgtatatgttacagagggatgcgttgaactcggtgttggagaagaacttttccatatggatcagggcgacattggttttatctttccaaatatcattcaccactatcaagtattttcatgtcagcacaatcaggcaatttatttaaatgcttctccattcctggttgaccggtttacagatattttggaaaacaaagcgccaaagccacccgtaataaaagctttctccatagaacctgatgtttatcatgcatttaattccattctcggcgcacaaaaagacgacattacattggtccaggcgtatctgcagattatcctggcaagatgtatcccgaaatttcagctggttgagaaaggttctgttggaagcacagatttgatctaccgtacggtatcctacgtctccgggaattttaagcattccattactctggaaagtatggccagaaatctgggcgtcagcaaatatgttttgtcaaggatattttctaaaacattccataaaaacttcaaccagtacctgaatgatgcccggctgggctatgcgtgtcagcgacttgaaaataccaatgatacaatcacggagctctgccttgacagtggatttaaaagtttgcgcacctttaaccgtgcgtttaaggaaaagttcaaaacttcccccagtgaataccggaaaacatttgttagaaattggaatatgatgtgatgtcaagaaattggaatatgatatgattgccgagcgcatgatcctatgatatactgatgggacggcaagtcagagcacattaatatgaccagacaatatatgcagagaagatattcgaatatctggagtatcacttgatacagaaaagaaagtttcctgatcttcgcggaagtaattctatccatattaacatattgtctagtgaatgataaaaccgtgggacacaagtggatagctcgcttatgctttgccctatcaaacaatcgaacgaaaatcccccacttcaagcgtttgctaagtgggggtatgtcgcataggatttttttgttcatacttgatttcatattgtccatgacattaaattcacatgtacatgcagataggcactttcgattccaaaagtgcctgctgtttgtcaaactctacatttttctttatctttatagtataactctatggactgatcaaatgcattttcctcataacacattttttcctgtccgcggcctacagccccgccttttctggcatccatcttagggtctgtgtaacgatcaaaccactcttccatttcagactttaagcgctggatctgctcttcccagactgggtttccataaaggttattttcttcatctggatccgtggaaagatcataaaattcgcaggggccatcaccgtagcggtggatatattttaattttcccttcttgatcatacgggtcttgctgtattcatcaaaaactacaatacgatcctcatattcagcagttggatgattgatctgttccatcagactctttccaggttgctttggctccaatttatattcacagccggccagggacagaatggttgggaaaatatcgtactgtcctgccatagcagagcaagtgcttcctggtgcctcgcagccaggtactttgatgatgaacggtacttttacagaagaatcatacatatttggtgggtaggttccgtttcctttaccccagataccatgctgtcctaagttcataccattatcggaagcaaagatgatcaccgtatcgtcctccaggccatggtcctctacccaatccatgatcttgccgacacccgcatccatggcagaaattgccgcatagtagccggttaagtattcccgtctcttctccggtgtatccccgatcgggcaggtatttgcctgccacgggtggatcggcagatccggcgtatccttgaattcgcagtccttgtaaagatccctaaattcctttggatgttcattttcttcccatgggctgtgtggcgctgtgtaatggacacttaaataaaatggtgcgccttcaccggacattttatccagatactctagagcatggtttgtaatggtgtcagtgatatattcatgagaaatggaaagcactccgttttcaaaaatatctgcatcataataatggcagccgcctcttccaacggtgaaatagtactcaaatccttttttcttgttgatgttatcacccatgtgccattttccacttaacgcacaatggtaaccattttcagccagatactccatataagtcttgtggccttttaaataatcaatggctttatcttccatgtcgaaaccgtccatcacagccatatgggggtatttccatgcatccagattgccttttttcagccagtcttggataccatggcaggaagggatttttccagttacaatgctggctctggccggtgaacacaccggagatgtgcagtaaaactcatcaaaagtggttccctgcgctgccaaccgtgttaaattcggagtcttaatgtcatggtttgtctccgattctactgcccatgccccctgatcatccgtaatgataaaaatgatatttggtttctttttcataatcaatcctttatcctttcctttatcctttcacaccacctgctgtaagaccgccgatataatacttctgcgctgccaggaaaatggcaaagatcggtaaaatggagataacgctggcagccatgatcaggctgtattttaatccagtttcatccatgaagtttaccagtcccaggttgatggtgtagagatttttattattgatgaagataagtgcattatcataatcattccaactccatgtaaagaacagaatgaccagtgttaccagcgccggcttgcaaaggggtgctataatctggaaacagatgcgcatatctcccgccccgtcaatgcgagctgcttcagaaagttcctccggtatctgcagcatgtactggcgcaccataaacacgccgtaaatggaaaatgcagccggaaggatcagtgcccaatgggtattgtaaatgcccatttccttaaacatcaacattttgggcaccattaaaagctgatggggaatcatcatggtcgccagataaagaagaaagatcttatcccttcccggaaactttatcttggaaaatccatatcccgcaaggatggaagttgttactgcaaacccaacggaaagcagtgttaccttcgctgagtttaaaaacatcaatgaataactgtatttaccaaaccagacttctttgaaattctgaaggttcagataatccggaatcagtcggaatggcactgcgaatatatccgcctctctcttaaaactggcagaaaccatccagataaaaggaacaatacacagcagtactagtgaccagagacagaggctacatattatttttgcgattcttttattgttcttcatttcatcatgcccccttactcttcattacgcttctggatgcggaactgcagccaggtaatgaagaagatgatcgctaacaggacgattccctgagcagatgcgaattcaagtttaccaaactggaaagctgtacggtaaatgttgtataccaacatggttgtggccgttccaggtccaccgtgggtcatcaggttgattagtccaaacaccttgaaagagttgatcaccgatgtgatgacgataaaaaaggtggttcctgaaagcatagggatcgttacataccagatacgggcaagcccgtttgctccgtcaatggcagctgcttcatacagatctttagatacattgatcataccggaaaggaacaggatcacggtatagcccaggttctgccatacacagatcatcacaatcgtcggcaatgcccagtgaagatctgaaataaagaccggcggatttgacattccaagttttctaagtaaattcaaaatcggtccattattagaaaaaagagccagccataccgcggagatcgctacaatatttacgatatatggcagatacagtcccaactgtacaaatttctttccgactacatattcatttaagagataagccacaatgaaagacagtacgattaaaatcaccacatagctaaccgtgaacacaatgttattgatgagggaagcgcgaaaccacgcatccctccatatttcaatgtagttggaaaatcctacgatcttaatgcctttaaatcctttggaaaagtcccacttcgagatacttataataaagctgaaaagcatgggaacggtccagaatataagcacacctatcaggttgatgccgataaaagcatagccctttgcggcagttttaagtttcttgcgcttttgtttatccataagtcatcacctgcactactgttcctgagcgatcttctgatccgctctcttttgggcattttgtaaggtctcttctacagactgggcacctgcaaataccttatcaaattcctcagtcagaatagtattgatctctgttgcaactggcatgttcttacgtacataaaagtcagttggtgtcagatagatatttttagcactttccatatcaaacagatcagactgctctccaaagatcagagaagccactttatctgcatcatatttcttgcacgctgggattcttgcatatggcgcaacataatccataccttcttccagataccattttatgaacttcatagcttcctgtggatgctgagatttggaattgatgcttaagtcatcgctgtaagaagtggtatagttattttcctgatctgcagacagtcttggcattcttgcaaaaccaaccttgaaatcgtgaggataattgtctgtatcctttacatttcttacgacccagtcaccaaataccatggcagccttgccagttaagagcatatttgcaggctccattttctgtgtggttacatctacataacttggctcaattccttcttctacacgctgtaagtacttctcggtaagatcttttacatcgtctgtatcaattgctgcggattttccgtctggagcgtacatccagtcaagtcccagcttgctctcgatcatacgaagagccggctgaccagcatcatatcctgggaagaaccaaccataaaccttatcatttccttctccctttgtcagctttctggctgtgtcaatgaactcatcataagtccagtcatcacttggataaggaattcctgcatcatcaaacatcttctgattgtaaagaatggtggatgtgatgcgctttgcaggaaggctgtaataatggccgttgatctccttctgggcaatattttcatcataatcatcttccagactgaatcccgcgctttcaaacagttcatccagcggatacatataaccgttctcaattctcttcattaaaagaacgtcattcatgttcaggaatacatcaatggaatcatcggacatcagtgtcatatccagttttgtatttccggcatcatcattgacatatcttgtgtactccacctggagatttggatctattttattaaaagcttcacatacctgttctggacccatattctctgcaaaggatccccaccagtgaagtacgaccggctctgtggagctttctgcggatgcattgctttccccctttgtatctgctgttgtgctggaactggaacttccgcagccggacagtacggaaactgccatcactgctgataaccccaatgcaactgttcttcttgttctcataataccttcctccttctgatttctgattgatgcccttattataggccaggtattccgtatttttgaatggagaatgaaaaggcaaattggtatttttttacgcttgtggtaatattttttgaaaattagtatttttttacgtaattctcaaaggcactttttttttcacgttccctattgtatactttaagcattagatgccgcttcggggtcttaaaagcagaaagaatagggggaatttatcgtgataaaacatacttttatgaaattaaacctatcatgccgtttattcctcattatcatcgtactgtttctcgtcccttatctgacccttttttcatgggcatataaaaaggctgagaccattatccgagacaaggcgcagtcactggaacgagaaaatctgaaccaaacaaaaaatgacatcgaaagtctctgcctaaacatgatccaggcttctgattatctgatatccttaaataattacggtgttctttaccgtgaatctgcaacaaagggatattcctatttaaaatgctggcaggatgccaatgagcagattcagaatgtaaataattccctgttaaattccaatgctgacatcagtgttttatccaatgaccaactgctctactccacgcttccccagcagaaattccgctttgaggatttttttgcggagcaggtagttccgtcggtatattttacgaacgcccaccagagttaccgccgttttgaaagcaatcaaactttcgtttcctatattagaaagctcccgccattttcaccgaaaagcttttatctggtcatctcccttcctgccagcagtttttcccgtctgttaggagctgcagcagggaacatggaattatgggatacttccggttattccatctgcgggatccatactcccaaagatgttaaatatttccaggaagaaatctccattccactttcaggctggcgcctgacggataccatttctacggaatttctctatcaggatatctatgaactgcgcacattcacgtttgttgtatccctgggactattaatgatatgtcttctggccacatttttcgctatctattcgcagctgcgtccactttttaagctgaaagaacagatgcagcaggttatggctgggaacctgaatgccgaaatcgccactaccgattccaaagatgagatcagcagtctttcccgaaccttcaacaacatggttacagagattggccatctgattgaggaaatacaggtcactcagaaacgggaaagtgagctgcgctttgaaatgcttctggcccagatcaatccccattttctctttaataccctaaactccatcaaatggatgtccgtaatgtccgggacagaacacatcaccaacaccattaccgctcttggccggcttcttgagatcagcatgaataaggtcaatgacatgcttcctattgaagaagagttggaaaacatcaaaagttatatcaagatccagcaggtgcgctatcccggccgtttcgatgtggcctaccacatagaggagggaattttaaaagagcacaccttaaaactgatcctacagcccctggtggaaaattccattctccacaatattgaagcacgggattttctcatgattgatatttccggccggtgtgaaaacggcattatcatcctgcaggttcaggataatggaacaggcatggatgcagatactatgaaagaaatcctaaaacccaaaaagcagggtaaaaaggggtatgtcttctccggtctcggcgtgagcaatgtccaggaacgcatacagctggcttatggtcctgattacggcttacaatatgacagcgacggcaactcttttacaaccgtgacgatccggttcccgcaacataaacagatagacagccttctgtccgaaaggagagagaacaatgataaaggtactgattgcagatgatgaaccattggtaagggccggcatcaaaaccgtccttccatggaatatgtatggtttcgatgtgatctcagaagcggccgatggcaaagaagcttacgaaaaaatcttaaaactcaaacccgacattctgatcaccgacatcaaaatgccgggaatggacggaataactttactcaaacgcctgaaacaggaaaaaatatccatccagtctctagtcctaagctgctttgatgagtttgaacttgtccgtgaagctatgaagtacggtgcccatgattatatccgaaagctttctattgatccggccaaactactggaagtcttaaaggaaatgaaagaggccatctctgaccagccggaaaagaacgcttccttttctttaaatacagacgatctgaaatatctttttatcaagcgccttcaaaatcaggggtttgaggatcacgagcaggtgaagaatgtactccataacatcaaactggatatttccattcaggattatcacctgatccgtttttcctttgaaccagatactgctccgattacggataccaatcgcaaaaacatgatctataacctgttaaaccagatctgcgaacgttactcaggacaggaactgttttcccttgatgaaaaaggataccttcttatatccaacacaaagaaagatcttctcctctgccgccagatcggagctgccatgaaacaatacgccaatcagaccgtatatttcggtatcagtcctttattaaaggatgaaacttcttttaaagccggaatgaaacaggccgaagaagccctttctgcctgcattttttatgagcgaagtgaaccgctgccttatccgctgcttacctccgtaggctttccattcattacggattcacaggcccaggaactttatattgccctttcctccggaaacagtgaaaaatcttcggaactggtccagcgctttttactatggcttaaaagcggcctattctatccttttcagtgttactcttatatggaagagatcctgaacattttcatccgggtggccagggaactgaatttttccctttaccagatgacagcggatgaaaatgacattctaaggcgcatccgccaggcccataccttacggacctgccagaaaatcctgtctgattttattatggagttttcagaatttgtccgcgataaacgttccggagagaggtctgaaattttgaagataaaagaatatgtccaacttcactatagcgaaaatatcgacttaaacctggttgccggtctcgtgaatgtcactccatcccatttaagcaatctttttaagaaagaaaccggcaccaacttctcttcctacctcaccgatgtgcggatgcaggcagctggcaaacttttaaaatccccggacatgctcatttatgaagttgctgaaaagacgggatattccaatggcggatacttcggaaaagcttttaaaaaatactggggcgtctccccggaagaatataaaaaagaaaaacgttaggagtttttatcatgccaccaatcagcgtgcttatgaaaccatcatccggcatgtgcaacatgcactgcgactattgcttttattgtgatgaggcccagaaacgtctgcagaagtcctatgggttcatgtcggatgagacactcaaaaatgtaatacgaaagaccatcctgcgggcggaaggcgttatttcctatgcttttcagggtggcgaacctacccttcggggactcgattttttcaagaaggcggttgcctatgaaaaacagtataaccgcaatcacatcaaggtgcagaatgcttttcagacaaatggttatcttttggatgatgaatggtgtgcatttttcaaggaaaataactttttagttgggctttccttagacggtatcagagaaaccaatgatatttaccgccatgctgccgggtgcggatccgtgtttgagcgcattttcggcgctgccaaacttctgcaaaagcatggtgtagaatttaatatccttaccgttgtaacgggaaataccgctgcacacattcctgaaatctatgagttttaccgtagaaacggcttaggatatcagcagtatatcgcctgtctggatcccttagaggaacctcatgggcaaaatccttatgccctctcaccaaaacagtatggggagtttctgatcacactattccacctatggtataaagactggaaaaggggccgccagccgtacatccgccagtttgaaaactacatcggcatcctaatgggataccgcccggaggcctgcgaccagtgcggtatctgcaacatacaaaatgccgtggaagcagacggcagtgtgtatccctgcgacttctatgtactggatgagtataaactaggaaattttaatacagatcagttggattcgattgacaggaagcggacggaaatcggttttattgaacgctccaaaaaactgaagaagagctgcctgtcctgtccatatttttccatctgtcgcggtggatgccagagaaaccgtgatctggatatggcaagtggactttatgtaaattatttctgcgaaagttataaaatgtttttcgacgcctgtctcccgctcatgaaagaagttgctgcagccgcgcaatgattgttacccaaaagaaaactctaaatattccttttctcttcagaatttatggaatatttagagtttctttatttcagacttactaatatattttatctgacttaccgggcattgaatgttctttcagaagaatgtgatctgattcagtcagagctatatcgcaattcaaagtctgttttaaaacgtaactataaaatcatttccagcaccattcattttccaaaactccatagaattcctccttccaaaggttttgcacaatattacttattctttccgtcaagaatatccacaatggtcttctccgttcctgtcataccaggtgacgcaatcagtcccatattgtgcatggtctcttccggagttgcaccgttgataccatgggcattgtaaatatatacatcgtccatagccagttctacagagtcaaaagctgcgtctactgccacaatacctttcatggtacatccctggttgccgccatcacagatcatacctgtaatactgcttgccatgttgttgatgactttttccatcgtttctgcgccggcgccttttaaccatgccagtgcacaggccattcccgttcctgctgcaatagcacagccgcagaaggcagacagtttaccggagtattccttaatgtacatacataccagatagcttaatgcagtagcacgaagaagctgctcatctgtatagttattgatcttgtatacagcatataacggcatagttgcaataataccatgggcaccggaaccggtgatgctcatagctggtttggaaagaccgatgactctcgcctcaatggctccgttgcagaataatgaagcagtctttctttcatcttctgataccagaaccccaccattcttctttaacagatatggtccgtaggtagtctttggactctttaagccttcctgaagcagctcgtagtttactttatatgcttctttgataaaatccaattcctgtgcagaaacagtatttacatactctaccatctgcgccagggtatactgatggatcagcggtgtagcctctttactctcctgtgctgcttttgcttctttttcaaatactacagttccattttctgtgatctttgtaatattagtgtgggcatcctgaatagtaacaactgcctctgaagtctcacctgttacagttgcttcaatgaaaatgcggctggtaatactgctcatggaaactgatatcattcccgctttgatcatttcgcctgcagcttcttcctctgcctttccaataccttccagacattccagacccttctttggatctgcagcaacagcgcctaaagcagcagcgtaataatttcccacctcacttgttcccggaataccgcaggtaaaggcatttttatacataccgctgtttaatcttaaacccaccctttttacagtgccttttatatgggcttttgctgtggatacagcaaaagcaatggctcccggttctgtaacaccaagagctggtttcatatcactttttatcagttctgttaatgcatgcatcttatttttctcctcaattctatgatcccaaagactttgcaaaaaggatgctgcaaaatgttcctatcatttcacagcatccccctttactcactctgacatcgcttacgcgatcatttacatttttttatatcgtatcctaatgaacgatcctaaataaagatctctttaattactttaaaacctctgccagatttaaagtagtagttccgtcttcttttacgaagcatggaattccaagacgttctgtaccgcggatctgtgcatacagatcagagttatcacgcagatttaagtatgctttaagatctgcatggcaggataaaatgtctttaaaatcaatttcagcccctgctgcagcaagctgctgtaaagcataaagagtgtctgggcaaagatgactgccgattactgtaactttcatagtgatttctccttcgtcttttatgtatttttgtattgtatgcataaatccgtgccaacgcgctccactgcctgcactggcaggcagcttatccattaaatggatcacccattgatttttttgttgatccagtccttgccttctacaagacgtgtgatcatcatagaagcaacagcatcaccagatgcatttaagcaggtagccattgggtctactaagaaaccgatggttgcgatcagtgggaatgcttctcctgggaaaccgaacaagctgacaataagcatttcacctacaaggccgccgcctggagctccggataatacaaatgcacttaaaactgctactgcgattgccattgcataggttccaacgcctgtaaactgcatgttgaatacaccgtacaggaaagcgatctttgtaatagcggataatacagaaccatccatatgcatggtagcacccataggaagaacgatattactgatatcctgaggtacacccatcttatcacatgcttcctggtttacagggatggttgcacatgaactctgtgttgcaaatgcagtaatagccgggttgaagatgttctttgccatggcttttacgcctttctttccgcctgcaaagtaagcatataacgggaagaatacaacgccgtaaacaatacacattggatagtagatcagcatgcagcggccataatcaccgatcagctgaggaccaaattcacctaccaggtttgcaaaatatgcaccaagaccaagaggagcaaatttcatgatcatatcaacgatcttcatgatgatgtcatttaagttgcacattactttaccaaatgggctttcctgtccgccgcactttgctactgcaagaccggtaaagatagctgcaacaatgatcggaagcatattctttctgctcatcagaccggagaaatcatctacagtcagtgtactaacgatcatatcaccaacacttgccatttctcccatttcaccgctggtcatctcaatagtggtgtttgcagctggtgggaatacatttacaactaccagtaccagaacagatgcgatcagtccggttacaataaatacaccgatcagggagccaaggatctttccaagacggttcatatttaacatacttcctactgcattaacaatagaaacaaaaaccataggtactacgaccataaacagcaggttgatgaatacattgccaattggtgcaagtaccgttgctttctctcctaaaatcgctccaaggatcgctcctaaaataattcctcctaaaaggatcagcgggaagcggtagctttcccagattttcttcttgtccataatttcccccaaaattatctcgttttgtattgttgtaaattatattgttttaaattgcactgttttaaattgtactgtattttatttatccagtgcatctacagcatcttttaactgtcccagagctttttccagtacgctgcgtgggcatgctacattcagacgcataaatccggtcaggcttcttccaaaggtatatccttcatttaatccgatcttagccttctcgatcataaactttcttaattcttcattgctcattcccagatcacggcagtctaaccatacaaggtaggttgcatccgggatatttggcttgatctgaggaatgttcttttcacagtattccttaacaaaatcaaagtttgcagacagataaggaagtaactggtctaaccactcgcggccttctctgtaagcagcctcaatggcaacagagctgaatgcattgtttctgtggatatccatggaactccagtagcggtcaaaatctgccttcattctcagatttgggaaaatagtggtagatgcctgaagaccagccaggttgaaggtctttgttacggaaacacaggttactacgtaatcatggatctctttggaaatggtagcggttctggtgtgcttctttccgtggaagatcaggtcggaatggatctcatcggagatcagcattacgccattttccatacagatcttagccatcttttccagatcttctttatcccatacaaggcctaatgggttgtgagggttgcacagtaagaatactttacattcttttaccttacgttcaaaatcctcgtaatctacatgccagcttccgttttcttctaccagaggattttctactactacacggccaattgcctctggaatatcataaaattcggaatatacaggagtctggatcaggaccttatctcctggcatggtgtagatcttcatcagagctgccatagtctgaacaacaccaaggcaccagctcatgtgggaagtttcaggcttccagccataatatttttcttcccattcctgtactgcttcaaagtagcttgccggtctggaagtatatccccagatcccctcttctgctttctttttgcatgcatcaatgatcggctgggcagtcttaaaatccatatcagctacccataatgggatcacatcttcggttccgaacttcttaagtctttcatcatatttagaagaacggttgttgcttctgtcgatcacttcatcaaagttgtacttcattgctgtttcgtatcctttctttcccgtttccggttgatacttatatattaagcaagttccatgccaacttttattttccccgattttttattgttttttgttaaaacaatggtttttccacttattttctggctttttggaaaattttggtaatttaaggacaagtcattttcaggtattaaatggttaattggttatattggttgatttattagttattaaatggttgcctaattggttgtgacctttttataaatgattcaaaggatcatttctgtttttccagttttttcaaccctttttccgtgatccgacttccgcctctgccccttccaacctggagcagcccttctttttccaactctttcaaaagatctcttgcctgtttctgggtcataggaatgtgatcttttttcgctgcctctaatattttctcccttcccactgtttctccggctttccaggcaagtgccagctgttttaatacaaactgctttttagcctctgtatccatatgaccggaataggttgaaccttctttcagctgtgtggttcctgttttcacgttttcattttccccactgctttcacctggtcctactacatccaaccccactcctactactctggtcatggtaggcggcaggtcggaaagctcgatcaccggttttgccagataattaaaatattccactgcattctgcagttctctgatgtttcccggccatggatgcctgcgcagaaaagccttcacttcttctgataaagtaaagtttccacccattttccgcataaagaaatcaaacagcataaaaatatcatctccccgctttctgagaggcggtatctctactgtcagtgcatttaaacggtaatacaggtcttttctgaaactgccttcctgtatcttcttctctaaggcttcattggtagctgccacaatacgcacatccacacggataatgctgccgccgcccacgcgcatgatctccccttcctggagaacacgcagaagttttacctgcatggaaaggctcattccttccacttcatctaaaaataaagttccgtggtgggcaaattcaaaaagaccgggacggccgccttttttggctcctgtaaaggcgccttcttcatagccgaacaactcgctttccagaagattttccggcatggcagccacattaatggcaataaaaggaccggctgcccgcccggaagcctgatggactgcatgtgccatcagctcttttccagtacctgtctctccaatgagaagcacagggctttcagttgctgccattttccttaaaatattaatggtttctgtaatagcatctgaatttcctattacgtcatcgaaggtataacgggcataatggcctttctgcatcagctgtcttcgcaaggcattctggcgggactcctgctcattaaacttctgtagcatggcaaaggcgccgatacagtcctcttttcgcaccaccggcaccactgccagggaaacattggttccaaagaggcggatcaccttctcaggaactgcctttttctcccggagcacctgataaaaaggaatatagggaaatacctcttcccccttctttcccatagccagttcttcagaaatgcgggcgatctgacaggcctttttgttacagacaaaaacctctcctgtttcatttacaccgatcagaccttcatccaggctttccgccagaatatgcatctggctttcctgcctgcggcttttagcatacatcaggtcaaagctgtagtgattggaggccactaccttagcataattcataaagctttctgtttccggcagatattccagtcccagacgcaaagctatttctaccatcattccataggaacagggacggtgatcacagtcgatcactgtttttacagaaggcggcacaaaacgggattcaccgggagttaccgcaatatccaccggttcttctaaaacagcgccgggataataaggaatgaactgcagatggtttactccaagagagcttaactgggtaatagcctctcttgccatattactggtaacattcacaaacaacactttcgttccttgtggtatctcaaacagtttttttagggtttcccagtaaaaagtaacctcaatggacatgatctgactatcaataggcacatggcgggcctcttcttctgcagaaccataggcatctgtagatatagcaaacagatccgctcttggaagcactccggcagctgatccatctcttacgctataccccactacttccgcatattcaccaaaaagatctcttacttcttttgtataggaagcaccggccaacggatccagcgccacaactgcaatttttttcatcgtattttacaccaacccttttatatactcttaaaatcctgttacggttcatgcggttcatgcgctgcatgaccagcaacggatctgccaaaaaacgtatctgttttttcttccgtatttatgataccattgatgatattcctaaaacaactgttttataaacacaatactgtttggaggcattttatgacatttacatataagatcccctgttttgatctggagcagactgccgggtcaggacaggtctttcgaatgataccggcgcctgggcgtacaaatacctggcaggttataagccagggccatgtttgctttattcgacaggaaaatgacatcttttttctggaatgtggaccggatttagaaaatttctggaagaactattttgacttaaatacagattatgagaaaatgatcgcatccatcacaccggacgatcactatctgaaagcagcctctaaagccggacagggcatccgcatccttcgtcaggatacatgggaaatgatcattacttttgtgatctcacagcaaaagacgatccctgcgatccgggcgttggtggaagccctctgcagccggtatgggacaaagattgaccagttttatgcatttcccacacctgaacagctgtgtcaggcttctttagaagatctccttgccctgaaacttggctaccgggccaaatatatctaccgcctctgccgagacgctgtagctggacgtctggacctggcgcatttaagcaagttggattataccgctgccatggagtatcttaccggcttttacggcattggcaagaaagtagccaactgtgtctgccttttcggtttgcatcacattgacgcctttcctgtggatacctggattgagaagatcctaaacgaacattattatgatgctgaaaaatacaaagatctgcctaaagccagactttatgaccagatgatcaccgactcttttggatgttataagggctatgcgggagtcatgcagcagtatatctttaattatgaacgcaatgtaatacacgggaaataatttgcagatccgtgagcgcctcactgcgcactttcaatatgtatagcaacaaaaaatgagaagaggcatatctcatcctcttctcgtttttttgatctatcttagatccatttatttctctgtgatctcaaatatcttccagcttttccggcttcgtcccactgcatactgccttgtgatattttcctttgtttcatccggccactgttcatctaaggaaacctggactactttataggaagtatagccaagaagtgtggcatggttgtcatactgggatttttcatccccatattcctcttcggataaggtcttaaaaccatgcaccagaacgtcctgtggataaataccattttcaaaatcagcctgcatactatcaaaaggaacattttttgccagatcatcagaaaggattttcccgctttcctcaaactggaccattgcattataccgcagatacattcccactgcctgttctgcttcacctaccggcatggactcaaatttgatatgccttggctttgcgtcatctgtaatagtatattcctggcttaaccggtttaatgcctcattccggctgtgtactgcgattgcaagcatcagtccgaaacctaccactgtcagaataaagatcttccagggcggcactgtattttttctcttttttatcagcatattgcagaggttctcctatttaaaaagccctttcttctttggcttttctccttctggttcaattccgttcatcaggtcatcatagcgctttaatgcatccttctgagcctgattcatacgctccggcaccttgactaccagtgttacataatgatcgccgcgcacattgcggttacgcagggatggaacgccttttccctttaaacgtaccttggtatcggtctgggtacctggttttacctcatactctacttcaccgtctacggtcttgatgcggatcggaccgcctaatgctgcctttgcaaaggagatcggtacagtagaataaatgctggtatcctggcgcttgaagattggatgctgggatactactgcctctactaacaggtcgcctctctcgccgccgtttgttcccggctcaccgccgccagccatacggatacactggccattgtcaatacctgccgggatagaaactttaaatttcttgcgaacagtcttgtatccggtaccatagcagttcgggcatttttccttaatgactttacctgtaccgttacactccggacaggtctgtacattctgaacctgaccaaagaaagactgctgtgtatacatgatcttacctttaccattacacttggtacaggtctgtggggaagtacctggctttgcgccagttccgttacagcttgaacatacttccttatagttgatctcaatctctttttcgcagccaaatacagcttcctcaaaggtaatgcggactgctgttcttacatttgcccccttcataggaccgcttctggatctggaacggccgccgccgaaaatatcaccgaaaatatcgccaaagatatctcccatatctccgccgttaaaatcaaagccgccgaaaccgccgccataaccagcgccgccgccctgctcaaatgcagcatggccgaactggtcgtactgctgacgtttctgaggatcgctcagtacgctgtaagcctctgaagcttccttaaactttgcctctgcctccttgtcaccaggatttgcatcaggatggtatttcttggcaagttttctgtatgcttttttcagggtatcttcatcagcgtcttttgaaacacccagaacttcatagtaatctctcttattctctgccatgttgtttacctcttatcactgctatttctttctctgccgggtccaaaatgccctttgtttaaacagacggtaaggcccggaaggggatatctcccctctcggacccgtccattagttcagacatgctagcttgcaacacactttcccgtccaaaacagcatatgtctgaaccgttatataatcttacacttctttgaagtcagcgtcaactacatcatcatctggcttggagcttcctgcattgcctgcatttgcgccacccatgtttggacctgcacctgcaccagcctgctgtgcttgctcataaacctttgcaaacagcttctgggcgctgttcatcagtttttctttacctgacttgatatcttcaacctgggcatcagtcatctgatcaaccgacgctctgttgatagcttctttcagtgcatttaaatcagcctcaacctcagccttgtcgttagcatcgatcttgtcgccaacctcttccagagccttctcagtctggaataccatagaatcagcatcatttcttgcatcgatcgcttccttacgcttcttatcctgagcctcatactcagcagcctctttaacagccttatcaatatctgaatcagacatgttagatccggaagtaatggtaatatgctgctctttgcctgttccaagatccttagcagatacatttacaataccgtttgcatcgatatcgaatgtaacttcgatctgcggaacacctcttcttgctggtgggataccatccagacggaactggcctaaggtcttgttatctcttgcaaactgacgctcgccctgtacaacatggatatcaacagcggtctgattatcagctgcagtagagaagatctggctctttctggtaggaatggttgtatttctctcgatcagtctggttgctacaccgcccatggtctcaatagacagagacagtggagttacatccagaagaaggatatctccggcacctgcatcgcctgctaacttaccaccctggatagctgcaccaattgcaacacactcatctgggttcagggacttgctaggctctttgccggttaactgttttactttctcctgtgcggagatcatacgtgtagaaccaccaactaacagtaccttgccaagctcagctgcggtaataccagcatccttcaatgcgttctgtaccgggatagctgtacgctcgatcaggtcatgtgtcagttcatcaaatttagctcttgtcaggttcatatccagatgctttggaccttctgcagtagctgtgatgaatggcaggttgatattggttgtagtcgcagtagacagttccttcttagctttctcagctgcttcttttaatctctgaagagccatcttatcgccggaaaggtctacgccttctgccttcttgaattcagagatcatccagttggtaattgcattatcgaagtcatcaccgccaaggtgtgtatcaccgttggtagaaagaacttcaataacaccatcaccgatctcaatgatagatacatcgaatgtaccaccaccaaggtcatataccatgatcttctgctctttttcattgtcaaggccgtaagctaatgctgctgctgtaggctcgttgatgatacgctttacatccagaccagcgatcttaccggcatccttggttgcctgacgctgtgcatcgttgaaatatgcaggaacagtgataactgcttcgcttacagtctcgcccagatagctttcagcatctgctttcagcttctgaaggatcattgcggagatctcctgtggagtgtatttctttccatcaatgtctaccttgtagtcagtacccatatgacgcttgatagaagcaatggttctgtctgcattggtaactgcctggcgcttagcaggctcacctaccagtctttctcctgtttttgtaaatgccacaacagatggtgtggttcttacgccctctgcgttagcgataacggttggctttccaccttccataacggctacgcagctattagttgtacctaagtcgataccaataatcttactcatagttttttcctcctgttatatatgtttgatgaaaaaatcataataaatgttccactcaactaaggctcgaaaagacctcgccaagtttcgggaacgactttcgcactaaactcgaaaagacctcgttaagtgctcaatgtcagtttgctacttttaccatgctgtgtcttacaacactgtcacggtacatatagcctttctgaagttcctcagctacgatattctctcctaagctttcatcttctacatgcatcactgcattgtggaagttaggatcgaatggctgtccggctgcctcaatggcttttacaccggcgtcttctaagactttctggaactgcttatatattttttccattccctcagcaaaagctgtatttttttcgctctccggaatggaagctaagcctctttcaaaattatcaactaccggaagcatacgctcgatgatgtcttttgcacccatctcgtacatggtagatttttctttttccgttctcttgcggaaattatcaaattctgccatctggcgttttacccggtcggtaagttcttctattttttcatccttaggatcttttttctttttaaagaagccctctttctcaggtgctttttctgtggtcttctcttctgcacttgtttcagtgttctcagaagcagtctcctcagaagcttcctgttccatattggacggatccttcagatcttcatttttcatttcttcgctcactgctatcacctttcatcctttttaaatgctgcatccagctggttcatgagatttttcaaagttccaagaactttttcataatccattcgcttaggaccgataattcctacggttccccgaaggcccccgcccagatcataattggctgtgaccacgctgcagtccttcatggactggatcggtgtttcatcaccaatgtatacctgaatgcctccatcgccctgctggtctgcgtttacatcggaaacaaattcctgcagcacttctttttgttctaatgttccgatcagcttgctggccttttctccttcagccagttccggataccggaaaatgttggtcgctccgctggtatagatctgcaggtcctcgccgcccgctttaatagcttctgcgacttcattcagtaccagttcgatcaccttactgtgaatgcctgcatcttctttcagcttgctgataatcccaagattgatttcttcaatggtcagtccgtttaagctgctgtttaagaggatgttcagattgagaagttcctgttctcccagatcttcgccaatatcgatcatggtgttcttgatgatgttgccttccacaaccactaccaccagaagcttatttgcttctactctggaaagctgtatgaatttcagctttgtcttgtggtagcttggtccgctgatcatcgctgcataattggtatttgccgcaagagcctgagccattttcttaaggaccagttccagtttatctactttctggaccatcacatccttaaattctgtgacttcgttttctttctcctgcatgatctggtcaacgtagaacctgtatcccttatcagaaggaatacgtcctgctgatgtatgtggctgtataatgtagcccatctcttccaggtctgacatctcattgcggatggtggcagaactgagtttcagttccgaatacttggaaatcgtccgggaacccaccggctcgcctgtttccagataagtctttatgatcgcttttaatatagtgaccttacgctcatccaactgcgcatccatgtgttcctgcctcctgttcgctgtttcttttgttattagcactcaacttattggagtgctaacatctacattgcataatatattcctttataaagaatttgtcaagggctttttgcgcattttgtgtttttcttgacagatttaaaaaaatgtggtaaatattactttatcgttcatatattacaaaagtgttacatatatttataatatattaaaaatacattgcaaatattatgaggcattgtgaacgaccgcagtccttgtcctttccgactgcaaaaggaggtagaaatgaacatgaagaaactattaaccacgacttttatcactgtattttttataattggctctgccttttgtgcattcgcttctgaaaatgacagttccgaacaggcacagcaaacagaagaagctgcaaacgatcaggatcagcaggaaacagaagctgccgaaaacgttgaagaaccggcttcccagatggtttccctgggtgtttttaaaactaccggttactgcccttgcagaagctgctccgcaggctggggaagaaacacctgtaccggtgccgttgccagctcccagcacaccattgctgttgacccaagagtgatcccatatggaaccagggttatgatcaacggggtggtttacattgccgaggacaaaggtggcggtgtaaaaggccatcacattgatattttttatgatacacacgcagaatcaaaaaaccacggaatacagaatgtagaggttttcttattagcctaaccatatgattaaataatatataaagccagtctgccagctgcctttggcagtggctaacaagatattggcaaaagctgtcaccggcagctgcttccagatacataacaactaaaaaacacggtcaggaaatatttccgtttcctaaaccgtgtttttttatgcccgtattctgttttcccagaccaggtctctgcctccggctgccagccagacacatcggtcttattctgtcctgatctccgctccatgatagaaaaaatcaaggatgtctttatacgtctttcctgcctttgccatgctgtgggcgccgttctggctcattccaactccatgtccgaaaccgccgccgtatacccggaatacaatgcttccgtcctctgccgtgcgcttctcaacggaaataaacgcacttggaagggctgccgttcctgtcatatcgcttccgtcctgtttctttattacaagttccgtatttccaagcatacttcttacctggctctggcctttgatcttgtagcttcctccatcgccttttacttctacttcagaagcaatgccgcctaaacctctggatactacatttacatcggttacatttcccactcccgggatctgtgcggaaaggatactggctttaatatccacatgccagcggaacataggataagaagcatcataagaagtaatgttttttgaccgtatgtaatcatcaaaagtatcattatcttccatagtcagctctcttgcgccttttttgatctgcatggaacgcaggtagggcagagccgccccttcattgccccatacacttccatctgccccatggccgcaggaagtggaataataaaaggcttctatgggcttatcattatagaaaagcatctgtccacaggtctcatttactgcctggtctgtacgctcgctggtacttatattgttgtacacctggaaattggtgctgtcatccacatgggcaccatactgcccgtaggcatttccctggatctggcggtaggcataagtccgggcacacactgcctgggcttttaatgcctctttttcataagacgcaggcatttcacttggaactaccttctttaaataatcttccaggtacaactcgttaataaggactaagccgccctcttctgctttcacttctatagaaccactgtaagtaggctgtccctggccacgttctaaggaagtgacggtaattccttcactgtcttccggttttaagatcatacgtccgttttccagctttttatcagatgcttcgtaggagaatgtatcccctttcttaaaggagctttcctgattttctccgttttccttttcgtagatcagttccccatcgcaatttgcagtaagttctatggtatcatgaaagatctgcttaaaaccattatccatgatcaggacgcggatggtttccgcatcaaatggctgttccagaacagcggcacaaagctttccgtcagctgccacaaattcctgcagatcataacctaccaggatgtttccttttccaaggacctggaaatccccgtaggtcttgtatacatgaaaattgtcatcgatgggtacgcagccatagccttccagttcaatagactcatccgtcactgcaaggacctttccacggacccgttcttttttcacagtgatctttttcagctttcccttttccatatgcaggtcagccacacaggatctcagttcttcattcttctcttctgcctgggatgccagtttaccttctgctgtaaaagttcttacatatttgccgatgtaaaccgtaaactgatctttttttacatcagagacccatatattcttataaacaggctcctcgcttacgatctgggtcatacctgccatttcctggcctctggcccagaaacggatctcgcagtcaagatatgcgtccagagccagtccctgaaagccaaaggtaccttctgttgtataagcagtccagctttcggcctgttccatattagaaggtgtgccaaacaaaacagcggaaacttctttcatatttccatctttgtccgtctcttttacaatggccttataaagctcccaccagtcatttcttgaaaatgtctttttcttattccctctggtcattcccacctgtttttcaaggccggatgacaacttttctgctaccgtatttacatcctcatatgtaagatttccctgggcagaagtaagagtcgccggtgtgatctctgtatccagataacctttttcataaagataatccatatattttacaaaccagtttcccttttccttgtctgtaaaagaggaattttcccgttcagaagccatatcttccaaggtctggggatcttcaaaaaccagagccagggctttggctgcttctgccctggatattccttctgcaggaggttccacttttacaatgaacaccataagcaggatcactgccgccagtattcctcccatccacaaaatcatctgttttttgttgatctttagatccttttcatttaacttcccgatcattttcataatatctgtcaccttattcgcacaagtatattcagcaagcccatgtactacaaaaagaaagcagcgagaacctcgctgcttttatcttctgtgaccccaagatgccgtctcttacttattgacgcctagcaatgctaggtgggcaacctcacttaaacttctgccttccacgcttaaaaaggaggcatgacatccgcttaaaaatattggaatccctttagtctaatgtaggttcaaaattggtaagaacttcgcacatcccaggtatcacatatgcgcttcatttattatggtgctattataacccaacattttatgtttttcaagcctgtttttttagttaatattgttatatattgttagtatttgcgtcttgatttcaggtattaagctgaactgtaacacccgtattgtcctgccggatctacgcccgaagattttccggtccaaaaccttccggcaacaattgggataaggtatataccttccactcttcttcggactttaccagaatgatcttaaaatccggcttacagaattcccgcatcacctgacggcagaccccgcagggggcacagtaatcctttactactccctttaagccgccgcaaagggcaatagctgcaaagtcacgttctccttcgctgactgctttaaagaaagcgcagcgctcggcgcatacagaaggggtgtaggcggcattttctatgttatttcctgtatagatattgccgttttcactaagaaggacagcggaaacgtggaaatgggaataaggggcataggagtttttaatacctgcaagggattttgccgccagttccctgatctgctcttttgtaagggtgtctgaggtaacaactgcctgttttttctccatattgcgtttctcctttcggatgttatctgcataatatgccatcaaaagcgcagtccgttttccgtgatacctgatttcatttacaaacctgcattaaggtattctatcttttgagaccgttttgagacgatcgtaaccatcacctacacaagtccaacaaaggttccgtctacatactccctcaggtcttccggacttacagtgacctgtacgcctctctgtcctgcgcttaccataattgtatcatataactgggcagtttcttcaatatatgttggaaattttttcttcattccgattggagaacagccgccccggatgtaaccggtgatacctaacatatcttttacgtggatcatctccactttcttctctcccgctgcttttgccactttctttaagtccagttcttcatctaccgggatacagcatacaagatatccctttttctccccttttaatacaagggtcttatacatctggtcatgatcgatccccatcaggtcagcagcatggctgccggaaaggtcattttcatctacttcatatgttcctgtttcataatggatccctgctgcgtctaacagcctcattacgttggtccttacttctgcttctgctttttttcctttcaaatttatcactccctgcatattgtaaagacactctggtaggtttcagagtgtcttttacttttctgatttgaatttttatcgtttggaatttgctttttctacgtggatatgtttgcctttgatgcgggcatggctcatggcatttaatacatcttctgcatattcagccggtacatctacgaaagtatagccgtcatacatatcaatacttcctaccagacgtcctggaataccggactctcctgcaactgcgcccaggatatctcccggtgttacacgctgggacttaccgatattgatgaacagtcttgccatgcgctcttcaccgccgtttaatacatagtcaacagctgctcggtcggtagcgcctttgcggcggctgttatttctgccacggtctctgcctctggaatttctgccatagctgtccagatcgtctaaggatcttgcaggcatatagttatcaatgatatcttcattgtcatcgcccatgctcatttttaagagggctgcagccagatctaaggaagtgtaatcatcttccatcagcttcttttcaatgatatttacgatctttgtgagatctgcgtcatttaaaatgtcctgaacctgatctaagatcttgtctgccttgatctcggtaatgtcatttaaggacgggatggcctgtgggatgatcttggtcttgcagtagcgctggatgtcacgaagcttgtaaacttccttgccaactaccaggctgaatgcctttccttctcttcctgctcttccggtacgaccgatacggtgtacataatattcatcatcctgtgggatatcgtagttaaatacagcttctacatttcctacgtcaatgcctcttgctgctacgtctgtagcaatcaggatatcggtacgtccgtttctaaagctttccataacgcggtcacgctgtacctgctttaaatcaccatgaaggccttctgcaaaataacctcttccctgaagtgcctgaaccagttcatctacctggcgcttggtgttgcagaatatgatagacagctttggggagtacatgtctaacagacggcacataacctctactttgttttttggctttacttcataataatactgggtcactttcggtacagtcagttcttttttaatcacgcggactgttaccggatctttctggaacttctttgcaatgtcagcaatggcctgaggcatggttgcggagaacatcagggtctggcgctcttccggcagctggcttaaaatggtctccatatcctctaaaaagcccatgttcaacatttcgtctgcttcgtctaaaactacggtatgtacatggtccatttttacggtcttacggcgcatatgatccatcacacggcccggggttcctactacgatctgggtgccatcttttaaggcgcggatctgacggacaatgtcctgaccgccgtatacaggcagaaccttgatgccgtgcataaattttgcaaaacggcgcagttcttcagctacctggattgccagctctctggttggaagcaggacaacggcctgaagcttctttaccttcgggtctaccttctgtaacagaggaagtccgaaagcagcggtctttcctgttcctgtctgtgcctgaccgatcatgtctctgccttctaatacaacagggatcgcctgagcctggatcggagaagcttcttcaaagcccatctcggtaatagctcttatgatacggtcatctaactgtaattcttcaaattttgttacatccattaattgtaaatatcctctttctattcttaatctaagttccacaggaatatgggccttaatttttcaacatgtcattgtccactggccttcgatttgcacatgttcgcctgtgtcggattgcatccgccacattcgtacatctgcactcaggatgtggacaatcgacaggttgaaaacggcccatattcctgcattgagcacgtaagcgttcgtcttccagaacacttacgtgcgaaagcacttcgttgcacttagtgaggtattccacgaacttagtgcaatcgaagttatcatatatttttaacatgcaatagcaagaaaatgagaggcgaaaacggcacgcacatgcaggcctttcatcctctcactttcgtacaatcaataactatatcagagttttgttttcatgtcaatgtaagaacttacacaactgttcttccttacacttcctgaaaatagcattttcacaagaacatcactagaactgcacaatgtccttgatctcagcggctttttccacattttctgcatagaggacaggtccttcgccgtggtaatctctctggtattctacgccgactttagcgcgtacctttacccattctttggtcttgtacttttctgcgtctttccatttgcacatgaaacctaagaatgtcatatctgcctcacagcaggtcatagccatacgtcccggaacgaactgtccctttgggaatttcgggctttttaataccattgcggtaaattcaacggtctttcctttgtagcgttccggctgatccatacagtcgatgtaccagataccgtagtctgcaggcttgatctcaattacatctgcattgatatcatatggaagatcttcttccagggttgcctgctcgatctcgccgttcttatcttccagaacgatctcgctttcacggctcatagcgcggatggtacggcgataggaagtcagcttctcatctgcaattccatcgcagcggtttacaatgaccagttcggaattacgaagcatagcgccaaggagcggcttcatattctggatgtacagatcaaaggtagaaccatcgataatggtgatctgctggtaaatgttccagtcatccggcagtttcagctcgtcctggttccacataccgttccactctaagagcacacgctccgggcggtagatcacttccagctcatttaagtaagccggtgtcagtttggaaagttcatctacatatacaacagcagtctgatgcttctttaacttcttttcatcatattctgtatccccttcttcgcagacgatcagaagtgtttttccctctgtctggaagtattcctggtccatggtaaattccagaaactgggtttttccagcttccagaaaaccgttgatcagaaatacgggcattacatcttcatctatctcgttatttcccatttttaaacctcattagcctcttccgaatactttgtttaattcttcttccttcaggctggcaccgatgacacaaaccttacctgtgtaatccggctttccgtcacggatctcatactgctccggtaccaggtcaaagtacagccactcgccaggattttctgtaggaagcattccctttgctcttaaaacatcgccaaattccttggtctctgccagacgctttaagatatcttccagctgatcctttgttacaggaacgatggtctccataccccagctggtgaatacttcgtctgcatgatggtgatgatgatgttcgtgatcatggtcatggccacagcagcagtcatcgtcgtggtcatgatgatggtgatgttcatgttcttcgtcttcatcatgatcgtgatgatgctcatgatcatggtcatggccacagcagcaatcgtcatcgtggtcatgatgatggtgatgttcgtgttcttcgtcttcatcatgatcgtgatgatgctcatgatcgtggtcatggccacagcagcaatcatcatcgtgatcatggtggtgatggtgctcatgatcatggtcgtgaccgcagcagcagtcatcgtcatcatcatcatggtgatgatggctttctcttacttcctctaacaggtcatctaacatggtatctctcttctcgatgatctcaagaagctggcttccgcccaattctgctaatggagtggtaacgatagcagcctttggatttttctcacggatcatctcaacatccttctggatctttgcagtatcagtaatatctgtacggctgagtacaacagttcctgcattctcgatctggttgttgaagaattcaccgaagttcttcatatacattttgcactttgcagcatctacgatggtaactgcgctgtttaatgcaacgtccatatctgcagatacatcaataacagccttcataacgtcggaaagcttgccaacgcctgatggttcgatgatgatacggtctggtttgtacttggtcagtacctcagataaggattttccgaaatcacctactaaggagcagcagatacagccggagttcatctcacggatctcgataccggagtcttttaaaaatccgccgtcaataccgatctcgccaaattcattttcaatgaggactacctgctcaccggaaatagcctcctgtaaaagcttcttaataaaagtagtttttccagctccaaggaaaccggaaataatatcgatctttgtcatcgtatgttccttctttctttattaatgccttctttaaattagaattagaattagaaaagcattttgcaatgggatcttatgatcccgtttgttcaatctgtcaattagatattttggcacaacctgaccttaatgtcaagtaatgggcccctctttctcattaacactggtctgcatgttggttttatgctgattttatgctttttaccgtttcctgcctaatacctgccacatggaaaacaaaccgaaggcaatgagatttaccactactacactggcgcctgctggtgtggaaaactgataggaagccatcattcccagcaaaaagcataccagggaaagaattccggaagagatcactacgctggtaaagcttttaaacacgcgcatagaggtaaggcatgggaagatcacaaggcttgagatcagcatggctcccatcatacgcatgccaaggacaatggtaacggctgtaagcacggaaataagcatattgtaggcacctacatttacaccggttgcttttgcaaagttctcatcaaaggtaactgcaaatacctggttgtagcaaagtacaaacaggcccagtacaatgatgcacaatactgctgataaggccacgtcttctttggtcatggctaaaatgcttccaaacatatagctgcttacatctgtggtcattcctgttgttaaggatgtaacgataataccgatagccagagagctggcagagatcatggcaatggctgcatcacttttgatccggctgttttctgtaatacgcagaaggaaaaatgccgccagcacaactaccgggatcgatacctttaaaggggaccagcccatagccagggcaatggaaagggctccaaaggatacatgggaaagtccgtcaccgatcatggaatagcgttttaacaccaggctcactcccaaaagggaggcgcacaaagatacaagcataccgccgaataatgcccgcaccataaatggataagataacatttcactaagcacgttcatgggtatttcctccttctatcttctgggaactgtgtgcgtgggtatgtccgcaggaacacttctgttcattgttttccagaccatccacattttttgccatatggcaggctgccgttggcagacactcaccctgttctttttcatggaagaaatggcctgctgccttactgttcatataatcatgggccgggccgtagaaaagcacctgtttctgaaggtggaggatcttgttggcttcctctactgcatttcttaagtcatgggagaccatgataatagctactttatcttccctgtttaatttgcggatcatggaatagaaatcctggattgccatcgggtccagaccggtgatcggctcatctaaaataagaagttccctggtggcgcagagagctcttgcgatcagcactctctgctgctgtccgccggataactccctgtagcactggttcgccaactgggtaatacccagtttttccatattggcagatgcaatgtccttttctgttttagaatagaaagggcgtctgcctcttctgcttaagcagccgcttaaaacgacttctcttacagaagcagggaaatctttctgagctgctgtctgctggggcagatagccaattcctgttgtttttaattcttctgctacggtcagtttgccgccggatggctttaacagccccaaaagtcccttgatcagggtacttttgccagacccgttttcacctacgatacacagataatccccagggcagacttccatatttacatttataaccgcatcctgattttcgtatccaagatcaacatgctcacatttgatcaatggttccatttttgatcattcctcctataaaagtgcttcctgcagattttttgcattctgcttcatcagctgcagataggtaacgccttcatcaaactgccttcttgttacattatggcaggaatgaaggagaaggggttttgctcctgtttcttcactgatgatatctgccgtccggtgactggaaagttccagataaaatactgcctggatctgattttcctttatacggtcaatgagataagcaatggtttttgcacttggctctgtatctgtactgcagccggaaaatgctgctctgtaagacagaccatattcctgggcaaagtaccggaacggaaacttgtccgctaccacgatcatacggtgacggccatttgccacaatatccttaaactcatcatccagactttttagttctgtttcatagctgtttttgttttcttcaaaataagaagcattctccggagatacttcttttaaagtttctgtgatcacttccactaacttcatggcattggctggtgaggtccagatgtgttcgtcatattcaatgtccatttcatgaccatcatgatcgtcaaaagtaatttgagataaattctcatgagtttttatctcatcgtcaggacgactatgatccatttcactgtgatcatgatcttcttcctcattttcgtgagcgtgaccatggtcatcatgggaatgttcattatcttccattccttccacgatctcctcttccagtacatctacatagtccatcatcgtaaggactttcatgttctccgtatccagggaagctactactttttccacccactgttccatctctccaccgttgcaaaccatcagatctgcctgctgcatggtgatcatatctgcaggtgtgggctcaaatgaatgactatccattcctgcaggaactaccattttcagtcttactctgtcccctgcgatctggcggacaaaatcatagtatggaaaaatagtagtcactaccaatgggcgggtatctttttcatcggatacctttgacgaattctgtcccactgtaccagatataccgcagccggaaagaaggatgcaacacatcgtgagaaaaatgctcacgatatatgtttttaagctgcgtttcttcttatttaaattacgttttaaattattcacttcaaatttattcaatgtggttcactgcctttataaaatctatcacctggaaaggagactctgctacaagctttggcttaaatgcctccagctcttctctcggacgaaagccccaggtcacacctactgtatctacctgggctgcctgtcctgtttccatatctgtattagtatctcccagatacaaacagtcttcttttttaagccccagttcttcgatcagagccactacaccgtcgggagccggtttcttgcggatgcctaatgcttctctctctccgtataccttgtcaaatgtatgatctccaaatacatgggctacattctcaagggctctctgatgaggtttattggacagtacggttgccagtatgccatgttcttttaagaaatccagaagctgtggaattccctcatatgcttctactttgtaaagacaacagtccttaaaaacttcattatatacatccaacgcttccttataataagtcagttctttatccccatatgctatcagggaacgttctaccagctttttatagccatctcctacaaactgcttggtatcttcaatagagatcggccccagtccaaaatggcccagtgtcaggtctacagaacgtttcaaagcataaatagagttcaccaatgttccgtccagatcaaatatacagcatttatacatgatgatcacacctttcttttatctgctgtttctatttttgtcgaaatcgtatcggggtaatcatagcatagaaataaagatttttccagaactgattttttcagcttaaagtatgttatactataatggtcccgaaagaaaaacaagacacacctacatactacagaaaggaacaaaccaccatgtcttctaccccatcaccgaaaagccagaaaatgaccgaaggcaatatcaccaaactcctgatcacgttcgcccttcccctctttgtaggcaacctgttccagcaattttataacacggttgacagtattgttgtgggaaattttgtcagtaaaacggctctggcagcggttggttccacagactgtatcatcaatacgatcatcgggttctttaccggtctttctaccggcgcaggtgtagtgatcgcccacagttttggcagcgggaatgacaaggctcttcatcgcgctgtacatactaccattgcactgacccttgtattatctgtagtctttaccattgccggactgcttttatcccctgtatttctccagttaatggatacaccggaagatgttcttccggaggcatcccagtatctgcgcatctattttgcaggtatttccggcctgatgctttacaatatgggttccggtatcctgagggctgtgggtgactccagacgtcctttatatattcttatggtctgcgctcttggaaatatcttttttgacctgctttttgtgatcgtttttcacgcaggtgttgaaggtgttgcctacgctaccattctttcccaatggatctcagcgatactggtccttgtgatccttacgcgggaaaaaagctcatacagattaatttggaaagacctgcatatccacaaaggaactgccatgtctatcttccgtattggctttcctgcaggacttcagatcgctgttacttctttttccaatgtatttgttcagtcctatatcaaccatttcggctcctcctgcatggctggctggacaacctatggaaaactggataagttctgtctgcttccgatccagagtatcggtctggcagttaccacctttgtaggacagaaccttggcgctgacaatatgaaacgtgccagaaagggaaccacggttgcattattcatctccattgcaacagccctgatcctgatggcacctgtgatcatttttgccccattccttgcttctctgttcaccaatgaaccggaagtgctgacctacggtatccattttatccgtttaatgatgccattctatctggccatcagtttcaaccagatcttcgcaaacgcattaaggggtgccggaaactccgtcacccctatggtcattatgatgggaagctttatcgtcttccgccagatctatctttactttatttcaaaatacttcaataatattaccgctaccgcccttggatatcctttaggatgggtgttatgcagtatattgctgatcatttactactggaaagtaggattaaatgtgaaaaagaagatctaaaacctggcttccaccacctgatgcttctccacatctaccactccatatgtattcagtctcagcttcggaataaccggaaggctgataaatgccagtgtcatgaaagcatcaatatcttctgaaatgcccagctctacagaaagcttcttcatatgctccagcttttcatctaccacttctaccggttcgtctgccatgagaccgccgatgggcagcggcagatctgccaatactttgccctcaagggcaatggcaaggccacctccattttcgatcacacgattgcctgcaaggaccatgtcttcgtctgtaactccggcgatgacaagattgtgggaatcgtgtccgatgctggtggctacggcacctttctttaagccgtattttcctaaaaatcccagtcctacatggcctgtatttttgtgccgttcaatggcagccagttttacgatgtcgcggcttatatctacaccgggagcaacgcctggcagttctttccactcttcgatccgctcttttgtgatcagttcatgggctaccatgtcaatgacccgctgatgggttcctgtggtttcttttaactgcagctcttccactgtaataggaactctgtggaaggaatggaatacacgttctttgatctctgtggaccagtctgtatttttttctttctgatggagcatttttccattttctgccaccagttttccacctttgtatacctgttttacattaagagttctcagatcatcaaaaactgccagatctgccttataaccaggtgccacagcgcccatatcatgcagtccaaaataagctgctgcatttaaagtacccatgcggatcgcacggatgggatcagcacccatggaaactgcttctctgataatggcatcaatatgaccaatacggatcaagtctcccggatgcttatcatctgttaccagcagacaccgctgataataggggtcctcaaacattcccataagagcttttaagttctttgccgctgttccctgacggatcatgatccactggcctctggcaaatttttcctttgcctcttcaaaatccgaacactcatggtcagagcggattcctgcagtaacataggcatttagctcttttccggaaagagccggtgcatggccatcaatggcttttttcagggaacgtgcctgtacaagcttttcaaagcaccccttatccccgtgggtcacgccaaaggcattcatcatttctgcaaggcccagaaccttttcatctgcgtaaaatggctccagatctcttgccagaagttctgcccctgactcgtctaaatcggtagcaggcacacaggaaggcagcataaaatacacatccagatccagcttctgcgctgactgcatcataaaccggatccctgccgttcctgccacattggcgatctcatggggatctgtgatcacggcaatggtgccatgtggaacaacagcccgttcaaactcccctggggaggtcatggagctttcaatgtggatatgtccgtctaaaaagccgggacacacataagctccgcccagatctttttctgttattccctcataatttccaattcctactatgtatccgccctcaatggcaatgtcccctgtttccactgactgggtaaatacattgacgatctgtgcatttttcagcaccagttctgcttttttgcttcctgtggcagctgccacctgctctctgagcaacttacatgttttcatgtatccccctcctctcgtatatacccccggaattcttttcccctaaaatgtaaagtttctaagagtaatactgcacctgggagtacattatttatatagatcttttgctatttctttgataacttcttcaaattttccctctctaatgtccatggaacaggagaacataagattgaccggatagttaaaatcctctacattagctccggtcatatccctgtattcatgttccggccccagattaggaaccttctcctttgccggacggatatcatctacatagccgtacatttttttgcctaactgaaaggccattccgcactcaaaagccacatcattgctgcactcatatccccgataatcatttaagtctgcaataatagcgtcacagttacgtacatgctgctgccagctgtcaaactggtttgcggctgctgtataagggcagtccgtatccattttttccacgccttctgcccagtctgccggtgtaaaagcctgcagtccataagaagcacataactcttttctcttcttatagagttctttggcatccttgtcataacgctccggcccagccagataaactaccggacggtctgacttgtaagtctttgcagcggtataatccacgctgtatccccgcagtcccttatatttcttctcttcctcaatgtctgtcatcagcattttcagacaatcgccgtaatccccttctgcgatctttgtagaagcaatgatacatggactgaatggaaggtctttataaggagcctcttttccgtgcggtccttgcaatcttaactttcggaagatcttcccatacatggtgataacggtagtcaaccactgtatttcccagtgtaagaccatctttcgtctcaattcctgctcttccttcaaaggtttcgatcagtgattcgtcaatggcataggcaacagccatacagtcaatgaccgtacaataagcctcaaaacctcttctattgacaaatcggatagcctagcggagaaatcctgcttccattttatcacttttatccaaagctgcaatatcattttctgtcaaatttacatcaaaatgggttgcaacgtccagaccgatggctaccaggttcacaccggagttgtatacaatcgctgctgtagtatgaggtgtgtacaccacacaggttccctcttttacaccggactcttccacgatcttttttacatcagacgtgatctcaaaaatatcatttttttgtagaaatatttatcttttttaacataatgttcccctttgttttctcttctagtgcattcgtactctattgcacgatcatttcgctttcgcggatgcatcttgcgccgtctgcgatcttccatacgcccttgcagcctctgccgtcctcttctccgatcatatccatgatataaccgcataacagacagatcggcgcaaactgggtcagtggcatattaatggcatattttgtcttaggaacctttacatagttggtatctacgccgaaatcttctttacccccatctgtgatcaccattaacgggcgtgtcagattatgggcaaacttgatcagttctttgttgcggctcatggccgggttagtcgtgtttgcaacgataatggttccgatcttgtccacatttctcataaagaaattcatatggagccattcttctgaattaatgtgcatggcatattttcccagtgcctcaaatacttttgcatgtccaaaccatgcagcagcatagtcaaagcccgttcctacgaagtcataagcttccatatttttccatttttcagcaatatcgtaaacctgtctgcacatatcaggaagcagctcacccagagcctttccctgtgctaccatgtcaaagcgcatatccatggcttcatccatggtgtagcagcctcttaaaggccattgagtattccagcactacctggcttggtgactttacccgctttcattttaatgtaactaaatagagacttacaaaacctgctgccagcgccatgccgcaaaacagcaggttttcttgtgctaaatgacctggcagaagttcaggcagcgatgccagcataaagcccaggatcattaaaaaagtggcttctctgtgctttttgatcagctgctccagaatacgggctgtgagataggttcccataataccaccaacagctaagggaagaagcgcaaaaatatccagactgctgatggcttttaaggtactttcataaattccaagcatatagagcatctgggaggcgctgatgcccggaaggactaaggcaactgctatgataaagcctcctgcaagctggaaaagcagatgcatgggagtgttttctgttccaggagcaaatatcccctgagggatcagggcgataagaagggctgtgaggatccctgtaaggatacagatcatctctcttccccggatacggcttacactggcgctttttaagatcatgggaatgccgcctgctactgctcccaggaagaagaaacataaaattccttctgcccttgtggttaaaagccagctgatccctctggaaaacaaaaaagccccgcttcctgctccggctgcaaaccagagcagaaatgtgagactttcttttggatattttgttatttcactgacatgttttaaaaggcggtcatagatccctaagaccatagccatagaaccgccgctgacgcctggtaccgtcatggttgcgccgatcacaaggcctttgatgaaagtttttccatttttttccattttatatgatcccctttttgcctctgacacatttgcattgccagagcataatttactctttatgggattttatggaaaattacaggattttatacatcagacctacgaacctcatgcttacccgctttactgcctgctgacgcaggcagaaccttccttactggtccagacaagcctctaatgcaacagtcatcatgtctgtaaaggaagtctggcgttctgctgctgttgcatgctcattctttggcatagagtcagagatggtcagcaggcaggttgcttttttgtggagcacatttgcattgtggagcagtgcaaagctttccatttccacgcaggcacaaccatgttttgcgctgatctctttgtagccgtctacatttggctctgtataaaatacatcactggaatgtacttttacaggctttacagtaatatgattacgctttgcagcctctaaaatatgagcgtttaattccggatccggatagatggtatctttatcgtagccattctgggtatgtgcaaaagtagactcactccatgcactttcttccagcactacatcgcctaaattcaattccggtacataagcgcctgcagaaccaatacggatgatctggtctacatcataaacagaaaacagctcataggaataaattcctatagacggcattcccattccgcttgccataacagttactttttcccctttataagtacctgtgtatgcatatgccccgcggacttcattaaccagcttcgcatctgtaagaaaatgctctgcaatgaattttgcgcgaagaggatcccccggcatcaataccttttttgcgatctcacctttttccgcctgattgtgtggtgttgccataataaacttcctccttttttattttatgtactcccggagtctttcaatgtacctatatcaaaagaccttttgacacttatattataaaatgatatcataattaaaaaaaggacatgtggcagttttgttgaatatcaataaatttaattatccatttacattaaaacaaaaaagctttttagagaatttctttaaatttgctccgccttatatacagacggtgctgatgctgcgctcttataaaaaaggcagccgtctggtagctgcaggggacagctgcgcccatgtgtatatccttttaaaaggccgtctggaagcggttgaggaacatgtggcaaatataccttatcattttacggagatacgtgctctggacatagttggtgattacgaatttttcaccgaaaaacagccccgtctggtaacactgactacacttgaagattccctctgcctggtgatccctgcagcggaatatatgacctggctgcgaagtgactcccacgctctttttctcagaagctgcatgatcatcacccagctggtagcccaggctcagttccagcgccagaacctttttgcggacaaccgcacccgcatgctggtctttctgaaagaacaggtgacaccggctgtaaatgacagcacacatacggaaaacagcaatggtaatccaaaacccggttccgtctatcccatccgtatccccttcaccaggccggagatcgcagcacatcttggctgctcggtacggacagtaaacaggacggttcaggaacttgtggatgaagagatcattcatttaaacaaggggaagatctggatcagtgagaaacaggccagcacttttctgtgatcgataactcagcccgcaaaaccacccaacacaattctttactaatgcataacgtgaaagaccgcctgctctttcttttgaacagacggtcttttctcatacttatttatctatttttcttttgtaacattgcttattgcaaaatccaatgctcttatcttctgcagcttcccaggccggatactccggctggtcttacatttccattctggcagccatcctgaaggcatgcaccaagaccatttaacaggcagtttaagtcctgtccgccgtttgcagcgcattctgcctgaatgcagtttgcctgatcatatgtacagctgtttacgttacacgcctgatttgcgttaggtacgcatgcggagccgatcattgctgcaagtgccattgtggatactgataacatagttttgtcctcgctttcattttgttacaaatttatttcatttatgttacaaaactatattatcacatttttctggaaaattacctggtaataaatggtagtttcacgaaccttcgttaatggcttgcttttcttttggactcattacattatataactgtctccgcatagtgtacagatgccatagcatctttgcaatacgcatctgctccaatggtatctgcatactcctgagtgagcactgctccgcctaccatgacttttacccacggggcgctttcacgcagctgcttaatggtctcctccatgcttggaactgtagtagtcatcagggcgcttaagcctactaatggtacatggcggcttacagcttcttctactactgtctccggcggaacatcttttccaagatcgatcacatcgtagctgtagttttccagaagaacctttacgatgttctttccaatgtcatggatatcgcctttgacagttgcaaggataatggtacctttcttttcctgggtctctccgctgcctgccatggcatttttgatcacttcaaaggctgctttggctgcttccgcactcattaacagctgtggaaggaaaacagtacctttctcaaagccttttcctacatggtccagtgccgggatgatctcttcattgatcacatccagggcttctttttcctttaaaagagcagttacgctttctactgctacttcttttaaacctctttcaatggcatttccaagacttcctgcgctccctgcaccgccatttccggctgcaccggaacctccggcaccatttccaccttttccaatggtctgtcccagacctgcagtctggccactgtaaatgctgatatattcactgcactgaggatccaggttcatcaatgcgttaaagctataataagcccgcatcatagcttcagagttcggattgataatggcagcgcttaaaccgctttccattgccatggtaaagaaagcaccgttgatgatctctctctgaggaagtccaaaggagatattggatacacctaaaacagactttccgcctaattcatcacggatctttctaagagtttcaagagtaacgatcgctccctggctgtcagagcttaccgtcatgcaaagaccgtctaaaataatatcttccggtccaattccataagcagcagctgtgtcaatgatcttctttcctactgcaattcttccctctgcagtctcaggaatgccgtcttcatccagacaaagtcctacaacaacaccgccgtattttgcaaccagcgggaagatctgttccataacctcttttttaccgttgacagagttgatcagaggctttccgttgtatacacgaaggccccgctccatagcctctgcactggaggtatctaactgtaatggcagatcaatgaccgcctgcagttcttttaccacatcttccatcatggaaggctcatcgatctccggaagacctacgtttacgtccaggacatctgcgccattatcctgctgggtcacaccttcacgaaggatatattccaggttgtggtcacggagagcctgtttaaatttggattttcctgtaggattgatacgctcgccaatgataatggtctttttatcaaatacaactgcctgggaataggaagaaatgaccgtgcggtgcttcttttccggcatctgcactgggatatcctttgtcagttctaccatggcatggatgtgatctggtgttgtaccacagcagccgccggtgatcacagcgcccattcttacaatctcttccatcacagcagcaaagtcttttggatctacgtcatatacggtctttccattttcacttcttggaagtcctgcatttgggttaaccaggatcggggtagaagaaacttccaggatatcttttacgatccccttcatctgttccggtcccagaccgcagtttacgcccagaacgtctactcccagaccttctaacagcgctacggtggactctacatttccgccagtaagcaatttgcctttttcatcataaataacagtagcaaagattggcagtcttgctcctgtttccgggttaatgccagcctcttttgcagctaaaacagcagcctttaactcatagctgtcactcatggtctcaatgagcaccagatcagcgcctgctgccgcgccaatggaaactacctctttgtataaagatacagcagtctcaaatggcagatcgcccagtggctttaaaagctttcctgtaggccccagatccagggctacatatcctctgccagcttcctctaccgcttttcttgcattggcaatagctgcctctacaatggcctttagctccccgtccttgtcatattttaaccggttggcgccaaaggtattggtagtcataatatccgcacctgctgccaggtattttctgtgcacatctgtaataacttccggatgggaaatattccagcgctctggcagttcaccggcagcaagtcccgcagcctgcagcagacttcccataccgccgtcacaatacaggcggcgcactttcatttcatctaaaatgctcatattaaacctcttttgatctattttatctgatctatttaagcgtaacagttcataatgactctgtccgctaccgcctgtacaggcagtctgtttttccgcaggcctcacagccctttacgtcacagcggtggggcttttggctcactccgatcactgctgttacggatttggaaggcatcatcagaaaactgtctgtcagtttgatccccaggtgctttcctgcatccagtgcatctaaaacagcgctctggcagcttaaagaaaaatccccgtatccgggactgaaccttggccgcagatacaggcctttttcttcgtactcttttttcaggccttcacacacctgatcgcagtattcctcgatcatagccgcagaagcagcctgcaagatcactgcgcggctcatttccaggcggttgtacttctggatcaggtaatccgctcccacacccaacgttgcggcaaaaaccagtattttttcacagtcttttaaattaacagaaagatttctgctttttgtctggaaaacttccccatcgatccgattgtctgctcccagagtaagaggaaattcccgcacccggtacttaggtgaaacatttttccacaaaagctccaggcagtcttccacgatcctacttacattttcgtctgcctcctggtttttataccccagatagcgtaaaacctctcttctgttaatatctgccagttccattttcctgtatgtcctcctgtcccaagccgttcactcagattcccgcactatcgtgctctactgcctgcattcgcaggcggaaccttcgttaatggcttgtttttcttttggactcattacgttatttcagcagctctgaaatattgctctggatctgtgcagctacatccggcttattcatggtgtacacatgaattcccttaataccatttgccagaaggtcgatgatctgatctgtagcataagcgataccagcctgcttcatagctgccggattatctccgtatttatcgactaaagataagaaacgtgccggcatatagcttccggacatctgtgcaatacgctttaactggcttccgctggtaacaggcatgatacctgcgatcacaggaatggtaatgcctttctcacggatgcggtataaatagctgtaaagaaggctgttgtcaaagaacatctgggtagtgacaaaatcacagccagcgtccaccttctgctttaaatagtccatatccacagacttattagaagattccggatgtccttccggatagcaggctgcaccaatacagaaatcccctgcttctttaatctcacggatcagctcagaagcatagtgataaacttccggtgtttttccgtcctgtgggatatcacccctcagtgccaggacattttcgatcttatgtgcctttaattcttctaatacatgatgtactttctctctggtagaagaaacacaggtaagatgagccagtggtgtcacgccatactcttctttaatagtagaagcgatctttactgtataatcactggttccgccgcctgcaccgtaagtaacgctcataaaatccggctttaattgggcgatcttggaagctgccttttctacggactcataagcatctgctgtctttggagggaatacttcaaatgaaagggttggtctgccctctgccagtatatcttttatcttcataatgtagatcctttctttcataaaacatatcttcaaatgtattctggggatacgtttcaggaacatatttccagaacacatttgaagaaatcatttttcaataaagggatgccgcaaaaaacgcaggcttctgcagcatcccccataaatcacagtttttattaccattcatgcgctgcacgaacgggtcttactgctctaatgtcacctttttcagatgccagatatctcttacatactcttcaatggtacggtcagaagtaaacttaccgctgtgggaaacattgataagagctgcttttgcccaccactgtctgtctctgtaagccttgtcgatcttctcatgagcctctgcataggaacggaagtctttcaggataaagtaagtatccggacggctgccgccacagttatttaacagagaatcatagatttccttaaacagctgtggttcctttggagaataatatccattggtcagctgcatcaggactctgcgtatctgaggatcgttgttgaagatatccattggattatagccgccgttattctcataattgataacttcgtctgcagaaaggccaaagataaaggcattttcctgtccaacttcttctacgatctcaacatttgcaccatccatagttcctaatgtaagagcaccgtttaacatgaacttcatgttaccggtaccggaagcctccttgctggctgtggagatctgctcgctgacatctgctgctgcaaagatgatctctgcgttggatacgcggtagtcttcaataaatacaaccttgatctttccattaatggacttatcattgttgatcacatctgctactgcgttgatcagcttaatagtcagttttgcacggcggtagcctgctgctgccttagcgccgaaaataaaggttcttggaactatatccatgtttgggttatcctttaactgattataaaggtacataacatggagaatgttcatcagctgacgcttatactcatgaagtctcttaacctgtacatcaaaaatagagtttggatcaacgtcaatgccgttgtgctccttaatgtacttagccagacgtactttattcttatatttaatatccaggaattccttctggcattccttatcatctacaaatgctgccagttctttaatatgaggcaggtttgtgatccactcatcaccgattttgtcagttacccagtcagctaataatgggttgccgtgaagcaggaaacgtctctgggtgataccattggtcttgttgttgaacttctcaggcatcatctcatagaagtcttttaactcctcatgctttaagatctcagtatgcagtcttgcaacaccatttacagagaagcctgctacaatagccatataagccattcttacctgaccattgtatacaactgccatctttgcgatcttgtcctgatcaccaggatatctctgctggatctcatttacaaaacggcggttgatctcttctacgatctgatagatacgtggaagcagacgggagaataagtctaccggccacttctctaatgcctcagacatgatcgtgtggttggtgtatgcacaggttcttgtagtaatatcccatgcttcttcccaggtaaggccttcatcgtctaagaggatacgcattaactcagggattgctacagttggatgtgtatcatttaactggaataccaccttctcagggaactggtggatatcatcatgtttttctttaaatttctggacagctctctggacactggcagaaataaagaaatactgctgttttaaacgcagttccttacctgcataatggttatcatttggataaagaacttcaacaatatttttagccagattttcctgttcaactgccttctgataatcaccgcggtcaaaggaatccagattaaaggtattaaccggttctgcatcccagatacgaagtgtatttacaatgtggttgccatagcctacaactggcaggtcatatggaacagcctttacagactgataaccttcctgtacgaaatggctcataccattgcggtcttcaatacgtacatagccgccgaattttacttctacagcatactccggacggcggatctcaaatggattgccattttccagccagttatccggaacttctacctgataaccatcttcgatcttctgtttgaacataccataacggtaacggataccgcagccatatgccggatagcccagggttgctaaagagtcaaggaagcatgctgctaaacgtcctaaaccaccatttcctaatgctgcatccggttcctggtcttcgatagcatttaagtcaaagcccatttcgtctaatgcttctgcgatctccttatattcacgaagattgatcatattgtttccaagggcacgacccattaaaaactccatagacagataataaagggtctttacatcttttttctcatattccttgtgggttgttatccactggtcaatgatatcgtcctttactgtataagccacagcctggaagatctgctgaggggttgcttcgtcgatggtacgacggaacatgttttttacattaaaggttactgcacttttgaacaaagccttgtcaaagcctgtatttttcatagccttcctcctcattttcccatatgccccctttacagaaagcatacccatattttgacccgcacacgcctgcacgcgctgctgatctgtttgacaaataaatgatacaaacaagggacaggtaacatttctgccctgtccctcatattaccattttttccagtctatttcaacttaaatacggatattaaaccatattttaccattattatatggctactttacagcttttccacacctaacataacagtctcgccgttgatgttccactctttggtgaagcccttcatctcacctaagtggatgtaatcagccataacctcgctcttgatctcatctgcgttgttcttgatcagctcagcgatcttgtcgttgccgctctggtatacgccgatgtggtccataacctcaaagccagcttccttacgcatggtctggatcttgctgatcacttcgcggacaaaaccttcttcgatcagttcaggagtcaggttggtatccaggacaacagttacatagttgtcttcttctgttacataaccatctttctttgctacatcgatcaacaggtcatcctttgtaagaacaacttcctgtccgtcaaagtcaaaggttaatgcgccggtctcatttaaagtatccatagcagcacttccgtctaagttggtcagtgcttcacggatctttcctaacagcttgccgtattttggtcctacggtctttaactgtggcttaaatgtataggaagtgaaggctcttacgtcatctgtaaaggttactttctttacatttaactcttcttcaatgatctctacatagaaatcagataatgcatggtctgcctttacatacatctgggcgattggctgacggttcttgatatttgctgtatttctggctgcacggcccataacaacagtatccagaacttcttccatatctgcttctaacttctcatcaatccactcttcctttactacagggaagtcgcacagatgaacgctttccggagcggtcttgtcgatctttcttaccaggttctggtagatctgctctgtcatgaacgggatcataggagcagctgcctttgcaacagttacaagagcggtgtacagggtcatataggcattgatcttatcctgctccatgccctttgcccagaaacgctcacggcttctgcgcacgtaccagttactcatatcatctacgaattcctggagagcctttgcagcctcagggatacggtagttcatcaggttgtcatctactgccttgaccatggagttcatcttggacagcagccacttatccattaccggcagcttatcatattctaagctgtatttggtagcgtcaaagttgtcgatatttgcatacaatacccagaatgcgtaggtattccataaggtacccatgaactttctctgtccttcggtcactgccttatcctggtatctcttcgggatccatggagcggagcaggtatagaagaaccatctgatggcatctgcgccatgcttctgtaaggtgtcaaatgggtcaactgcatttcccttggacttactcatcttctgtccgttctcatccagaaccagacccattacaactacattttcgtaaggagccttgttgaacagtaaggtagactcagctaacagggagtaaaaccatccacgagtctggtctacagcctcggaaatgaactgagccgggaactgggactcaaacagttccttattctcaaatggataatgatgctgtgcaaatggcattgcaccagagtcgaaccagcagtcgataacttccggtacacgcttcatctgcttgccgcacttcgggcagcggatggtaacagcgtcaatgtatggacggtgaagttcaatatcatccgggcagttgtcagacatgctctttaattcttcaatgcttccgatggaatgctgatgtccgcactcgcactcccagatatttaatggagttccccaatatctgtttctggaaatgccccagtcctgaatgttctccagccagtcaccgaaacggcctttaccaatagactcaggtacccagttaatggtgttgttattgcggatcaggtcatccttaacagcagtcatcttaatgaaccaggattctcttgcatagtagatcagtggagtaccgcatctccagcagtgtggatagctgtgctcaaatgcaggagcatcaaataacaggcctttttcttttaagtcttttaatactaatggatcagcatcttttacaaacttgcctgcaaatggagtatctgctgacatatcaccctttgcatcaactaactggacgaaaggcaggttatacttgcggcctacattagcatcgtcttcaccaaatgcaggagcaatgtgtacgattccggtaccatctgttaaggttacataggtatcacatacaacatagaacgcttttttgtgctgcttctcgcagtatggaacggagcagtcgtataatggctcatattccttgaattccagatccttacctacataagtttccagaacctcacagccttctcctaataccttttccattaatgcatgtgcaatgtaataggtatagccgtctgctgccttcacttttacgtattcttcatttgggtttacgcaaagtgccaggttgcttggaagggtccatggggttgtggtccatgccaggatataagcatcttccccttttactttaaaacgtaccactgcagaacgctcttttacgtccttgtatccctgcgctacctcgtgggaggaaagcggggtaccgcagcgtgggcagtaaggaactaccttaaagcccttgtataacaggcctttatcccagatctgctttaatgcccaccattcagactcaataaaggaattgtggtaggtaacatatggattgtccatatcagcccagaaaccaacagtgccggagaaatcttcccacatgcccttgtatttccagacactttccttacactgcttgataaatggctccagaccgtatttttcaatctggtcctttccgtcaaggcctaacttcttttctacttccagttctacaggaagtccgtgagtatcccagccggcctttcttggaaccatatagcccttcatagcacggaatctcgggatcatatccttgattacacgggtctcaacatggccgatatgtggcttaccgtttgcggttggcggtccatcatagaatacatatggctggcagccttcacgcatcttaatactcttctcaaaaatgtgttcatcttcccagaacttttcgacttctttttctctttccacaaacttaaggtctgtggggactttgtcatacatccttgctttcctccatttctaaatttgaagaatgtctcacaggtacttttcaaggtcagcgccctgaattttcaatacatggatctgtcacctgacggtgcatcaccataaaaaagaaaaagcttccatccccgtaaaaggacgaaagcttagattcgttcaaccacctgttactgcataccatcatatgagttcccttaacgcaggaaatgcggcccggcctacttaaaacttcagctggcagctccggagtgatcttctcctctttcctactaataccggattcccacctgcaccggctctctgtgatgtttggaaaaggatactgtctccttcttggcttttcttttataactttcattataacagttacattataatgactggggatggaaatgtcaacggctaaactgaggagaaaactttaaaaatacacggtatctatccaaaaaacaacttcatatcctcttccaccgtcgtgattcccgcaatatgaaacttctccaccagcactttcaacaccgccggggacaggaacgcaggcagcgttggacctaagtggatatttttaatacctaaggacaacagcgccaggaaaacgatcacggctttctgctcataccaggcgatgttataaacaataggaaggtcgttgatatcatccagtccaaatacctctttcagcttcatggcgatcactgccagggaataggagtcgttgcactgacctgcatccaggatccttgggatgccgtcaatgtctcccagttttaatttattgtagcggtacttggcgcagcctgctgtgaggatcacggtatcttttggcagtgctttggcaaattctgtataatattcacggctcttcatgcgtccgtcacagcccgccatgactacgaatttctttattttcccggactttaccgctgccactactttatctgccagcgcgatcacctgggcatgggcaaagccacctgggatcgtaccaaattccagttctttaggcggcggacatttctttgcctgttctatgatctgggaaaaatccttcttttctcctaagccccctggaatataggtacagcccggatatcctgctgcaccggtggtgtaaagacggtctttataactggcttttggcggcacgatacagttagtggtcataaggatcggcccgttaaatgactcaaattcttctttctgctgccaccaggcattgccataattccccacaaaatggggatatttcttaaaggccggataactgcaggcaggaagcatttctgaatgggtatacacatccacgcctgttccttttgtctgctccaaaagcatttccaggtcccgcaggtcatgaccggaaaccagaatgcccggattttttcttacaccgatattcactgctgtgatctctggatctccataagccccggtattggcagcatctaacatggccattccctttacaccgtattctcctgtttttaaggtcaacgccactaattcctctgccgacaagctgttatccaatgtctttgccagagtttcctgtataaacgcatccagctttggatctgtatgcatcagggcattggcatgtttggtataagcgcaaagtcccttgatgccataggtgatcaactgctgaaggcttcggatatcctcatctggattggaaagaactcccacttttccggcgatcacctcccagtccccgcttccgtcccacaaagcagcctcagaaagcccggaggtatcttttaccttctttaataattcttttttcacatgaagagtgtcatggatccggttctcaatggcctctttatcaaaattagcatttgtaatggtcataaacaggttcattaccaccatgcggttttcagcatcactgatattcgtgccttccttacgcagtctggttgttacctcacaatacccctttgtcacatacaccaaaagatcctgagctgccgcaacctggggatttttgccacagacgccggttaaagtacagccagtgcagttggctgtttcctgacactggtaacagaacattttattttccatggatctggtctcctttgcactaataaatttttgataattctttgatagatttagaataaccatttttcctgaaaccatgtaactatgtccggttgccaagaatatacatttcctctatactagaaaacagatatattttcccgcgatcgcggaaatgatatatcactaaactacatatcacccattaaaggacttatttttatgaaattaaatgaaattgaaataacagactttaacgccccggagcttgacatctacgcccgcttcaacgaagcccagcttctccactattttgaaccggctcccggcgtatttattgcagaaagccctaaggtaattgaacgggcattaaatgcaggatatgctcctatttcttttcttgcagaaaaacggctggtcgcagctgacgctggcgaaaccagacagcttcttgaaaaataccctgatgtgcctgtatttaccgctgaatacaatgtacttacaaaactcaccggctttgcactgacccgtggcatgctctgcgccatgaagcgcaatgtccttccttctgtagaagatatatgtaaacatgcaaaccgcattgctattttagaagatgtagtaaacccaactaatgtaggagccattatccgttctgctgctgcccttggcatggacgctgtacttctcacccatggctgcgctgatccattataccgccgcgcctcccgtgtgagcatgggaactgtattccagatcccatggaccattcttcccaaaaattcttggccggatgcttccatggataccttaaaagctttgggctttaaaactgctgctatggcattaaaaaccgactctgtatccattgacgatcctgttttaacttcccatgaaaagctggctattgtccttggcacagaaggcgaaggcctgaaagatgctactattgcagcctgcgactacaccgttctcattcctatgttccacggagtagactccctgaatgtggcagcagccagtgctgtggctttctggcagcttggacggaggaaataggcattttatttcgctctgtcagaacacttgtcttgtcatgtgtatataatattgttaaatttgtaacgatatgttcctttttttacataaatatgctatattgttacggaaactttacaaacaaccgcacacagccatttatttcaaaccaaagactgtgtaccaggagggagccaacttatggatcacagaaatctcacactactcactgacctgtatgaactgacgatgatgcagggctattttaaggaaaaagacgcaaatgaaactgtcatcttcgatatgttctaccgtaccaatccccatggaaatggttttgccatttgtgccggtctggaacaggccattgaatatatcaaaggactccattttgacgaaagtgatattgaatatttaagaagtttaaatatatttgcagaagacttcttagagtatcttagtactttccgttttacaggcgatatctacgctatcccggaaggtaccgttgtattcccaagagagtctttaattaaagtaatcgcaccgatcatgcaggcgcagctggttgaaacagcacttcttaccattatcaaccaccagagtctgatcgcaactaaaacagagcgtattgtccacgctgcaaagggcgatggcgttatggaattcggtctccgccgtgcccagggagctgatgccggtacttacggcgcaagagctgccatgatcgcaggctgtatcggtacttccaatgtactctgcggaaagatgtttgatgttccggtaaaaggaacccatgcacacagctggatcatgagcttcccggatgagctgaccgctttccgtacctatgcaaagctgtacccatctgcatgtatcctgttagtagatacttatgataccttaaaatccggtattccaaatgccatcaaggtatttaaggaaatgagagaagctggcattccgctgaccttctacggtatccgcttagacagcggtgacctggcatatctgtcaaagaaagcgaagaaaatgctggatgcagccggcttcccggatgcagttatttccgcttccaatgacctggatgaatatttgatcgacagcttaaaggtacagggcgctaccatcaattcctggggcgttggtaccaacctgatcacagcgaaggattgcccatcctttggcggtgtttacaagttagctgctgtaaaggacaagaccaccggtgagttcattccaaagatcaaattatctgaaaatgctgaaaagatcacaaatcctggaaataagaccatttatcgtatttatgacaaggaaaacggcaagatcattgcagatctgatctgtctggtaggcgagaagtttgatactaacaattctctcctcctctttgacccacaggaaacatggaagaaaaccttattagcacctggcagctacaccatgcgtgagctgttagtaccagtcttcttaaacggcgaatgcgtttatgaatcaccaaaggtaatggatatccagaaatactgtaaggaagaactggataccttatgggatgagtccaaacgtctggtaaatcctcacaccgttcatgtagatctttctaatgaattgtggcagacgaaacagaaattactggacagctatcacaagaaatgaaagtaataagaatatgatcgcatgataacaaacaaggccgtctgttttcgcagacggcccatttcgtataaatgtctctttgtttttgactctggtatcacattataaataatcacttacgcagatcgcaccataaggccggatgctcatattataagcgcagccttctcccaggcatttctccatatattttgtatattcttctaccaggtcatttggaagcattgccatgataacacctgcgaaaccgcctccgtgtacacggcaggcacctctctgcttctgggctataaacagctctgttaaagcaagggcaacggtaattccctgttctgcgttattgctggtagtaaagcagttctgcagccatttccaggaagaatttccggatgctgtgatattttccaggaaatcattaaaacggccctcttttaatgctgctacctctgcttccactctcttattttcctcaaagaaatgaagggcacgcagtactgcacggtctcctgcaaacttccggatctcaggaagatgctggatcaccttctcttctgagatctgggctaaaacatcttttccgaaatactttgccaccttcttcatctcttccggaatggaagaatactcagcactcagatcagcatggccttttccggtctggacaatgatcagactgtggttctgtgccttgaaatcaaaatcgatcttctgtactaccggagtcataggctctacaaaatcaatggtgatcaggccgcctactgcacatgccatctggtcaagaagtcctgatgccttgtcccagtatttattttccgcaaattttccaatatgggcataagccacattgtccatacggctttcattgaaaaatgcatttaacatggagcataataacatttcaaaagaagcggaggaactgacaccggctgcgctgatcacattgctggtaatataagcattaaagcccccaacactgtagcctgatgtttcaaatccctttaaaatacctttgatcagatcaaccgttcctgctttcttagcacttggctccagatcatttaagtcaatagtaatgtcctgattataggtttcgctgatgatccgcacatggctggaataattctttgcagctgcgcctacacagtctaagttgatactgccggccagcaccttgccgtggttgtggtctgtgtggtttccgctgatctctgtacggcccggtgatgagaaaagaaggatcccctcattatctccaaaattctcttcaaaacccttcagtactttctcatatcttgccttattttcagctgctccttttccataaagttcatgcataaatgcatctgttttttcactatttaactgttttatggtctcacatacattcatagctgccctctcctttttctgctgatatgctattatcagtctaacacaaaagtaacatctgtcacaatacaatatttttcgatattgcacattctttcatggacagctgacattttttctgttataactggacatacatatgacaacggttcctgctttgccctgcaggcggaccggaattatttttaaggagtcttacatggaactggaacacaactggaacggccgcccctatcacagtctggactgggagctgaaacatacatttggacataaagtatataaactgtcactggatgcaggtcttacctgtcccaaccgggacggcacctgtgggaccaggggatgcattttctgcagcgaaggcggttccggagattttgcggaaagcctgaaaacagatgtatgggatcagatcgaagctgccaaaggacgggtaagtaataagaccggctctaatgaagcttgcaattatatcgcctattttcagtcctttaccaatacctacgcaccggttttttatttgaaaccactgtttgaacgtgccatcagccacccggatatcgctgctctttccattgccacaaggcctgactgcctgggggatgatattatagacctgttaaaagagttaaacagtaagaaaccggtctgggtggagcttgggcttcagacgatccatgaaaaaaccgcccgctttatccgcagaggttatgaacttcctatgtttgaggatgctttaaaacggctgaaaaaagccggcattactgtgatcgtccatgtaatccttggacttcccggcgaaaccacagaccagatgaaggaaactgtaacctatctggcagaccggcccattgacgggatcaagctgcagctgctccatatattaaaagggaccgatctggcagatgtctaccagacagatccctttcatgtgttttctatagaagaatatatcgatcttgtgatcgactgtatcacgcttttaccgccccggatcaccattcaccgcatgaccggtgacggaccgaaaaatctcctgatcgcgcctttgtggagcggaaacaaacggcttgttttaaatcagctgcataaacgttttaaagaacgtggggcatggcagggacagtgttatgtgttcccgcttatccctgcggcactaccgttccgtcatcctcaatggtaacaccataggaaatccctgtcatataagaggcaaagtctgccttctgggcttcattttcaagcactcttgtatatccggcggaagacgttcccggcacaaaggtaagctggcttgcctgcccatcccactgcaccttaagcagtgccgtcttagggatactgcttccgaaaatgaaattgcccagactgtatacgatcggctttcccttataatattccaccccctgaagcacatggggatgactgccaatgactacatctgccccggcatctatatactgctttccaagagatctctggtagtcttccggcctttcactgcgctcaatgccccagtgaacatataccaccagataatcacactgctctctcagcttctttatctcatccaccagtattttcggatcataggtagtaagcatacccggctttgtagaagttgcattccaggaagccaccggtattaccctggatgctcccagaaagccgatctttttgccctgggcttctaaaataacaggtgcttttgcctcatctaagttctttcctgctcctactctcctgataccgactttatccaaagtatcacaggtatccagtaaagcatctgtcccataatccatggcatgattatttgccagtgtcacaatatcgatccccagctctttaaaaacaaaggtcaaagacggtgccgcccggaaagtaaactgcttatcctctgccggcgttccccgggtactgaaaggaaattcctcatttgccatgaaaatatccgactcatcgatcacagactgaaactggctgtccagtacgctgcggatgcctccgtttttataggcattcatcacatgatctgataaaagaatgtcaccggaaaagaccagatttaccagctgatccgttggctctgcttcagactcagtcttactctcctggctgtcattttctgactcacctgtactgctatcattttcggcagcttcttcatccgtgttctgtccagcgctgctatttccaccgttctcattcttttctgcaccaacaccattttcctgatcctgtttaccatctggctggccatttttgctttcactgctttctgccaggtcttcatttccattttcttccagtttttcagacactgacccgctcttctgccccgccagctcactggcacttacataagaactgtttttcatatgccggatcgataaacccgctataactgccaacagcagccctgtaatagcggccgctgtgcatatccatttttttctgttcattttttattcctgtttaccaatattaaccaattgccagcacgataccaccgtcatttgcatatacggtagcaacgccagctgcatttgtaacaacgatctccttaaaagatgcacgctttgccagttcctgctttacgtactctcctctttcaggattatttacatggcatacaactgcacgttttcctgtggtatcccctgcttctttaatggcaatatcgcacattctctgaagacccttgttgatacctcttgcctggtctaatttgatgatcacaccatggtcagcgcccataactggcttgatatttaaggcagttgcaaagaatgcctgcagtccggaaagtctgccgttcttgcgtaaggtatcaaggctttcaagaacaaagtaggtgtgcatctcgtcacggaattttctcagtttttccactacttcttcaaagtttaatccctgttcacacagatccctgatataaagggcctgctctaactgtcctgctgatgcagactcggaatctaaaacttcgatctttttagaagacgtaattcctttttccttcatttcttcttcatacagctgctttgcaagagcagctgaattataacttccgcttaaatggctggaaagagtgatcacaaatactgcctctgcatctgctgcctcatatgcttctttaaagatctctggggaagggcaggcagttttcgggcactccggacactccttcaccatacggatgaaagctttctgatcaaaagtctcatcatctaccacctgtgcagcccccacctgcaatgtcagcggtaccatctgaaacctcgggtcccttttcagttcttctgtcagatcaagacagctgtctccaatgatcttgtaagtcatgtttctatcctccggttatccaacatgtcgttcgattatcctaacatgtagtattcattactacttattataacagcatactatataaaatgcaatgctaaccgaagtttttattcctgttcataaggcaggcctgcagcaaatttttcgcaattatgacgcatataatattttctgcagtttcttcacagagcggctgtatttggaaagttccgttgcctggggcatatttaagacctgggcgatctcccggtgcttcatccctgcagctgcatacaaaagcacgatctgccgttccgtttcatttaactggtctaacgcctgtaaaagagcggtcctctctgctgtctgttctaactgtggctgtggcacaccggtatcatcgatctccccgtcttctaaagtttcctgccgctttttctcccgcagacgcatatagcaaagccgccttgcaatggtaaatacccacgccagcggctttccatagggaacatagtcccctgcatgttcccacactgccagaaatgtttcctgcatcacatcttctgactcatgtggatcctttaaaactgagaaaataaaactgtatacagaccgggccgtttcctcataaaactgccgcagcccttctttatctccatttgccatgtcacagatccagttttccagttccattgccattataccagttcccattatcccttctgccaggactaaaatggcggcaatgcctatttctccgatccatgtttctctgaacgaaaactgttttctgctgtgatggaacagcggcatcccggctcccggcggctgacttcattattgatcctgtttttcagtcttcccactgccgatgctttatattctcttggaaccaccagatcgaacaccagacacacatttttgcctgaccctaccatgcgaaaatcatggaacgacaggcggatatcaatatccataagcacccggctgatcagggagcggtactgggccagacgtttattatcccgctctaccgggtccatgtggatcactaacatcatgttaaatttttttgcagcatccctttcgatccggtcaatgatctcatgggaatactccggatcgtagttgcttggaacttccgcatggatagaagccatactgtgggacggaccataattgtgaacgatcaggtcatgggttcccagtattccttcatagccttctacaaaattggatatttcctcataaacctccggttcaatggcttctccgatcagcggcgccaacgtatcttttgcaatattcaatccgccgtacataacagccacggaaactgccagacctacaatgccatcaatattccagtttaaatatttcaaagcaagaagggataaaatggctgcactggtagtcattacatctcccatggcatctgcagccgttgcctccatcaccttggaattgatcctgcttcccagttttctgttaaacaatgacagccagaacttcactcctacggaaataagaaggatcagcacggagatccatttaaaatacacttcttccgggtggagcacttttccaagagaagttttaaacagggaaaatcccacctgaataaccaggaaagccacaataaaagcagaaatatattcaatccgcccatgcccaaaagggtgatcgctgtcagccggttttcctgccatacgcacaccgataaaaccgataatggacgatgcagcatcggataagttattaaatgcatctgccataacggacacactgtttaccagaacgccaataaacagcttggaagcaaacagaagcagattgcagcagatgcctacaatacttgccaggatcccataccgggtgcgcacctggggatcttctgttttatcatgatctttcacaaaacattttactaaaaaatcagtcatcacttatcctcataccctacatttaccaggaacagtccctgagccggggcagttggtcctgctgcctgccggtcctgtgcgtccaggatccttgttatcttatccggtgcacattttccctgtcccacttcgatcagcgtgccagtaaggatacgtaccatctgctgtaaaaatccatttcctgtaaaataaatatgcaggcggcttcctgactgctcaaactctattttttcaatggtacgtaccgttgatttcttcattttcttattgccgcagaaacttttaaaatcatgggttcctgtaagaagaccggctgctgccttcatggcagaaacatccaaccgttctcccagaccataataataatttctctgaaaaacatcttttttcggtcccatttccagctgatagcaatacgtctttctcactgctgaaaggcggctgtggaaacgctccggagccacttcacaggataaaaccgcaatatcctccggcagatactcattgatatattccatgatctgatccggcgttttctttccgccacatttttcccttttacagccctgtccagcctggtttccggcatttttttccagttcccgcttctcctggacttccagttttttccagtctatgtgaaaatttgctacctggcccctggcatggactcctgcatcggtccggccggaaccatggacttcgatctcttccccggtcatcttaaaaaggatctgttctaattttccctgaatggtcttatctgtattcccctgtttctgccagccattataccggcttccgtcataagccattaccactttataattcattattcctgctcctgtttccgctgccctttccctttgcagcttttctgccagttttcaaagcgcccgtcattttcatgaaacctgccgtaaccatgatcccggtaacaattcccgccatatccagccacacatcggatatctgaccggacctgccttctacaaacagctgtatggtttcatctacaaaaggcataaaaagtactgccgtcacatttccttttaaaaggcaaaatacaggcgctattccagcccctgtattcatcgccagtaaaaatcccagtcctgcatattctgtaaaatgggcggctttgcgcaccagatgctctgtcagccaccaggcatccattcccgctcctgcaaggaaatcctgtatcttcgcaagaaaatatccgctctccttagaagaaatagctgcaggagtcagagaattgccatatataaagcagagatataccaggatcaggatcttccatttccattttttcatgaacgttttcatgaattctcctttgagaaaattccgctttcatctactgcatggatcgcacgctctaatgcctcacggtcctgtaccagagccatacgcacaaagccttcgccggatggtccgaaagcacttcccggtgtcaccataacgcctgtcttttctaccagatccataacaaaagcttctgaagacttatactgcttcgggatcggagcccatacaaacatagttgctaccggacggtccatttcccagccaatggagcgaaaaccgtcacagagaatatctcttcttgcctcataggctttcatggtatcataaacacagtcctgatcgccggtaagagctgctactgctgctgcctggatcggcaggaacatgccatagtccatattggattttaacatcttaagatgctttacaacctctttatttccaaggcagaaaccaattcttgcacctgcaaggccataagtcttggaaagtgaattaaattccacaccgatctcttttgcgcccgggtaacttaaaaagcttccgcaggtctttccatcaaatacaagctcgctgtatgcattatcatggagaacaatgatatcgtatttctttgcaaatgctaccaggtctctgtaaaactgcgcaggagccatagcggtagtcgggttgtttggataagaaacgaccatcagttttgcttttcttgccacttcttccgggatgtcctgaagctggataatatagtcattttctttcttaagaggcatataataaagctctgcccctgcgatctgcggaccatctccgaatactgggtaacatggatccggcaccataacgatgtctccctcatctgcaatagacagggcaatgtgagccagaccttcctgggaacctaaaagggaacaaatctctgtatccggatccagttccacatcatatcttctcttataccagtctgccactgtatctaacagctttttggtatcgctgatggcgtaaacataattctccggcttcatagcttcctcgcaaagtgccttgcggatatgctctgccggtggaatgtttggcgcaccgatacttagatcgatcacttcttttccttcactgatccttttattcttgatctcagccagtctggaaaaaattccctctccaaaccgatccatcctttttgcaaatttcattttcatttcctccaaatatgcatcatgttctctcgggatctttctgtgcctgagcaggtgcatgaaagactccgagaggacatcttaaaaccattctggatattataatacaaatgaatggcggtgacaagagggatgcaaaacttatcttccagtatttcccagctatctcctggtataatagatctctgtctttaataaaaacttgccctgagatggccagccataacggctgcttgtgcttccatcactgcctgtataatccagatatctttctgtgttcatcatgatccggccatcttccagaaactcaatttccgggtaattataagatctttccagttcatttttccggtcccgttcatattcatcaatacggccgtctgaattaatatcataataccattccccatcatcccggataaagcgataggtagttctcaccttatctacaaaacggtatctgtccacatctgtttttttgatggcaaattcctcatatgtaggcttggacggatagatcttctccagccattcatcccaggaatttccctctgttatcccgcacagcacatattgccgggtctgttcattgtaaacgtaggatgcagctccactgtaactataaatcccctcataatcaatgggattggcatttacgttgatctttgcttcatttacagcctgtcctgtttttttagtttggacaacaccattctgcacccaggcaccgcttgcattcactgtatagccatccggtgttgtagtatctgtcagcagccagccattatgatcgaaataataactttccgctgtcccatccccatttccatcgatccactgccagcagtttgaaggatagcttccgttgccgttatcataccaccatttattctgattttccccttctccccctttccaggtacccgcaaaggccgtacctgtcatcgccagggatgcaagggctgttatgcatacgatcttctttatgttcatttgttttcctccacatttctccaatacgtaacatgctgtctccgttcacgtaatcttttcttattatagcagaaataatggtaattggcgaatgggggattggagagatcataaataatccgatacttcaaaaaaagcaggaccagaagatagtttctgatcccgcttttaacttcagatatgttttataacaataatccaaatgaaaaattattttctagtgtagaaaatattgattgctaaactgccttttgcaggccatccataataagtatttacatcatcttcctctgtataattcaaagtgatctccatctgcatggcaactctgccgtcacttaagaatataatctctggataatagtatgaactttcaatatctctcttatccatctcagcttcatctatttcaccatctgcatttacatcataataccattcaccatctacattgataaactgataggtagtcattccatcaacaacgatcttatacttttctttacttgcccctttgatggtgaaattataatatgccggatctgccggataaatttttccggaccactcttcccaggaatcattgtcggttactgcaaacacatcactgtttccagcgtctcttttgacactaaataaatagaaacggtcattgtaccttcgttagtttctgctacgatctttaaaggatcctgaccaatatttataaatttcagatccttgccgcctgcttctgatatagtggcatccattcccaccgggatgtaggagacatgggaagaatgtggatagcgctctataactgggagcagggcatcacacatggcagcataaagcgtggacgatacctgacagataccaccgccgtattcatagcggccgatcgcaggcgccataacgtatccattttccggtattctcggtaacagcgtctgactgtaagaaaaaagctgtcccggctgtataaccgttccgtttaaccgttctactgctattcctatatttacggcccttggtacggttgtatcataatgggtcgaataggtaccgatcagaccttgttcatctcctgtcggcaggcaggttcttccttccgcctttccaatttccatataatgtttacaataagctgacagatctgttttataataatccagcagatctctgttatgtaacacataggcccgtaaattaaattctgcatttcctgatctaccttctcttaccccgatcgtcataaaatgatgaaataaggcttcactgtcattacctaattgtccctgcagatccgggtactggttataataatagtccgggtcaaatacggatcggaaatattcttcattaccagcagcaaataccgtaatactgttaaataaaataagtaaaaataatacacctataaatcttatcttcacataaataaagcttttcatatcttctgtctcccctgttaccatcattgcaattggttacttttttaatagtactagaaataatagaaaatatcaatagataagacaatacaaaaaaagccggaaatcttgtaacttaagactccggattatataataaaaaagcgcgagacgggattcgaacccgcggcccccaccttggcaaggtggtgctccacccctgagccactcgcgcattttaaaaagatatttaattttgatacataccttcaaaaccacatattgaactgttgattttccgaatacttacaacttttgttgtttttccctaaaccttattggtcaagccctcgaccgattagtatcagtcagctccatgcattactgcacttccacctctgacctatctacctcgtcgtcttcaaggggtcttactacttgcgtatgagatatctcatcttgaggggggcttcacgcttagatg

SEQ ID NO: 3542 - DNA, 2654 bp, Unknown
  gut microbiota DNA sequence
gacggaagcggaacggaaccatttttttcaaatacggaagagaaaagcgaagattttgtctggaagcatttggaaagaatgtttttggtgaaccttgccatgtcaaagattgtggccgtttatgaagaaggacagattgaatgtgggacattttgtgtgaatgaaaaaatggcccaaataagaccacagcatcataacgaccagaagttggatcttcccatgggccggaaaccaaccgaagtttttcattatcaactggttgtggtaggcactggtgggaccggttcctattatctgaaggaattaggtgcaatcctttcatccttaacgaaggaggaacgcaactcctatgcattatccataatcgatggagaccgggtggagcagaagaaccttgaccggcagaacttcctgaaagaggatgttggccagcataaggcaatggtactggcacaagctcttagagaccattatgggatcgaagtaagagcatatccaatgtacattgactccgctgagcagttaaaagtggtctttaagcagatgacgggaacttattatagacgcacggtcccgattctgattgggtcagtggataatcaccgggccagacaggaaatggaaaaatggttccgtcagacgcctactggtatctggatcgatgcggcaaatgaatttcacactggcgaggttgtagctgcagtcaaaaagaatggaaagatgttgtcaccttccaggccgtactattttccggaaatcatgcgaagccgggaaaagcgggcaagtgaattaagctgtggggtgatcaaccagtcttcaccgcagcatcggtttaccaatatggctgcggcaatgctggctttatcagctactctcggaattttaagaaacgggttccttccatataaaatagtttattttgatgtgtttaagggaaatgctattccggtaaatgcgggagcggaaaggggaatattttttgaagatagtgaatgaggagcgttatcagcagctcttcgatcatccggaagaactgcgtaagatcattacctatgcaaagcgtctgatgcagtatgaaaaatgttttgattattcttttcgggataactgcatgaagatggaacttttacaggtagcggtacaacgcatcctgcaggaatatgggattgaagtgggggaagtttatgatttatcgattgaatggattgagtcagacgatgaagatgacttcatcagtgaaaatgaagaagtactcttttgtgtagaaactccatatcctgggattattgggtttaccgatgtggtttctgcctatgaggatgatacagaaactctggaactttttccagaagaagtaaaggcagaactgaaagaatacctgggggaatgtggaactacggtacttactttggacgttgtggagcaggtaatacgctggtatgaagaatgcagggactggagactttgtgaaatcgcatttgaagcatatgagttgttttgccagtctttaagtgtttcttattcgtccgggacagattttattcaaattggtgagcattattactggctgtacaatccagaagagaactcagactggggagatatgtttccggtatctccggtatgtgacttatgtgggattgttctttatgtgttaggaaaggcaggaggagtatgctaaatctgagcgattataaggaacacttttgtgaatacatattgttccggtacgcatgggcgaatgaatttgtgaaagaaccgtttccagaaaatttatacgaatattatgatagtttcgcaaaagcttaccggtatctgatcgaaaaaataggatatccggtgctttactgcggagtgacaacatctgcagagcagatcctggaacctattcttgcaaaatgcagaatgaaatatgaacagtaccataatttactgaagctttatgatcaggatgagccgtatcttatgctggtgctgcaagataaccagcagaccgatcaaagaggcttaaacgtatttggcaatgcgtttaatggaggcggtctttacatttcctatggtacatataaagataatgtgccggcctggaaaacatgtctgcttgctgcgaaattggaaatgtgttatcggctaaaggaggagcgcgcgtggaagtattaaaacaggtgatccggctcatgaaaaggatagaaggtgctttctgtccgtggagttatctggatcagatggactattttcaacagggtggttgcaacgaagaagaggcatatgcgtatgcaaattccaacatgggcagatctgccaggtattatccacattatcagatgtgggtcagccatttagtaaaccggctgatcaaagcaggtattataacctgtgagtatgagacggcagaactaagaatggaggatgtaccggttgaaaatcttttatgtattgtcagtgatgaatgctctgagggattggaagtggcagatggccagaggaaaagaacgctagatgccattatgaaggcattagggtttgaattattggaatttgctgaattggaggatttggatcatatattgtccagggatcagaaggcggcattttacagagcatttgatgaattccgatgcgatttttatggagaagagcgagagtttgtcatt

SEQ ID NO: 3543 - DNA, 24089 bp, Unknown
  gut microbiota DNA sequence
gggagaaaatgcaccgcttctttctgaaacggatattttcgtggaactggattattttgtgatttcatttgaaggttttttcattatgatatatccttcagaaactggattttgcgatggatatgtggaaatcacgtatgggattggcttcttgtcatggaatcttatcccattattacagatgctgtatggaaagttaaatggaaatgtcgaagaatttttcaatcgttctgtcatggaacaggaagcgcagccattatagtgtaaccaatgaggacatggcttcgcttcattgagtacgaattactgagaaagtgagtggagaaaatggtgaaaattgtatatggaacggaaccgtactgcattgaccatgaagtacggaaattagcggaaaatacgacatattatgtgcaggtatttgatgccatagatggagtgaaagaatttctgcaaagcatttcattctttgggataccctgcgctatttataaggtggaggatgtgaaaaaagagaggaaggaactcttgcatcttatggaagagtgtccggaaagttcctgcttgatcattcggacggaaaagcttgacaacagcaaggactggaatgcatggaaaagtaagcatggcatatgttgtgataagctgaatggaaagtcttatcaatgttggatccaaaaagcttttcagtccttagattgtccaatagcggagccgatgctgcgatattttatcgacaggagcgcttatgcataccaggaacgcagggacgggaaagatgagacaatagatctttaccagatagctattttcattaaacagattgcatttgcgtccatggatgctggagtgagcaaagagacgattgaccaggttgttcctgcagcagtggggaaaagctgggaattggcatcaaagcttttactggatcctatggaaggtatgaagctcgcggtggagttattcgatcatgggaataatagccttaagctttacgggatgcttcttcggaattaccgggttgcgaaaaaagcgttattgttgtcagatatgaaggaaaatgaaattttaaagcttttaggccttacggaaaagcagatgcggggaatacgggcctatcggaagttaccggaagagcgtttggatacggtaatgtcgatattgatagaggcaatgaacagaacgaaaatttcttttggaaacgagagaaatctgtttatccagactatggcaaaattgattatattataataggaagaaacccagacagagatcagtgatgatcgtgcctgggttttttattgtcatgtttccaggagtcggattgcccgtacatccccaatagatatacctccatttgaaaaatgctgtgcattgctattgataatatgaattaaaattatatattgataataaaatcattagaattacaatatattaaatgtaaattgataattttataaccaacgccatcttcaaattcatactaaaataattgaaacgggaggtgggagaatggccaatgcgcagcaagaggattttgttcgtagacggattacggaattgagactaagcaaaaacatttccgaacacaaaatgagtctggatttggataaaagtggatcatatatacgtggcataaccagcggagcggccttaccgtctctgaaagaactgtttaaaataattgcctatttagatatgacgccggcagagtttttcgcaccactggatgatgaagataccacatacagaaaagtgtgtgaaaaattacggactatgaatgaatcggatattgaaaagattaatacttttatagggtggattgaaaagtagagattgcttgaaacttaagaggaatgctttagaggcatcctcttttttcttttgctaattaggaatcagtagtataatgaaagaaaacgtattcgggggcgctgcagattttcatcagaagtcgaaacgttctgattatagcaggggaaatccgtaatttaggaaaacgggaggaaagaggaatgggtaaggttttgatcgtgatcgacatgcagaatgattttgtgacgggaactcttggcaataaggaagcgcaggcaattgttctaaatgtgcaggcaaaagtaaaagagtatgcggaccgcggggatcggataatttttaccagggatacccatggggagaattatctggacacgccggaggggaaaaagttaccagtgaagcactgcatcaatggaacggaaggctggcagattgtgcctgggctggaagtggaaaactgcgaatatatagacaagccgacctttggctggcttaactgggagggctttggctcaaacgatgagattgaactggttggagtatgcacggatatatgcgtggtctccaatgcgttgatcctgaaagccaagtatccggaggcgataatttcagtggatgcaagctgctgtgccggagttacaccagaaaagcataatgccgcactcgaaacaatgaagagctgccagattgatgtgtatggacaggaagagtaaaaaggagtatatggaaaatttttagtggttctttgccagaaaatattctataataatcttgtatacgcagttttctccccgccgaaaggcaaaaaaattatgtgtatgcaatcaacttataaggctctttctcagttatattaaagggaaagagcctttagtatatcgtggagagataatataataaatgggctatcgactataagaattgataatgtaaaatgtaggttttgcgctggtcatatcgggtaaagtattgtataataattaacaagcacacaattctgacatcatatcttccttcacaggaggagcttttttaggttaaaaattatagaagcagtgctgagaaagcgtttttgcaatgatattcctatcttttttcaaatatatcgtcatagatttgaatgatgttccgctcaatattaacgccatgcaaaaagctgaaaggaatatggtgggattggattgtttgcatgaatttgtaataattgctgtggccaagtgtatccgtaaagaggataacccgttctgcctttaaaatggacatattatccacggtgcttgatacggatgcgctgacaaatttccagtttgggaattcctgtcgaagctttttaacccagttctcgttgccgccaacaatcgtgatccgtttcattgcaattgcttttttcatttctgaaatcggaatatttacagtaggaggagtgtcctcggtgctgttgtaaacaaattcccgcagagccgtgagctcctgtttcattgcatcatattctttaagccttttttctaattcttcccgtgaatgtttttcttccttatattgttcctgaaaatgtgaacctatggaaagtgcatcacgtaaacgtatctttaattcagatagctcggcttctgatttgaaagaagattccataggtgctggtgtttgctgctgccgggatgtcttttctgttttatttgatgaattagtatccaatgatttctttttcatagactgcagaacttttaaattcttctctttcggaatagtctggaaaagatattcttgtgtttgggcatggatgaatcctaatgttacccccagatatcttgccagatcacagatcatcatgtaagcttgcagctgctcggaatcatagtttgtcaatttaattgtttttgtaatcagggccatgttataggcattaaaagctccgtcaccgcataggcctaaagtttttggagaaaggccgctcattttgattatttcccgtgcaagttttaaactgttggagagttcattcctttcctgtttatccgtcagcattttaagcacggaaccatagtgctttactgtgttggtgatatcttctggatcaatactgatatgggtagtatccgcagtatcctccagatattgttccatttcgttgttaaggtctgaatagaagatgtcacaatctgagctgcaggaaatatgaaagaatggagccatggtcagtattcgtgctaatttttcagtatccaggggcatatcctcataggaagagtattccaaggtgcataaatccgctaaattacggcttgtaagctttggatatcgtttaaactgagaatattcttttttatgataaattttgtacatactcttcagcagctctgcacaataggaatctccactctgggcaccgcataagattgatgcaaggaccctttgctggtgattgtcgatgatactggagcagttaagtaaattaaccagaggaatggcatctcggccgaactgggggagtttggcgcggctatgaaagatgaaatcggtttctatttcaggaaaatctttttccagttcctcagtcaagaaggatgtcagaaagagaacctctgcgccggttttatcaatagcctgaggctcatttgcgttactgtctgaaacattagctaaaaagtctataaaattatctaattcttccggcagtatatcttcggcggaacaacttagtatgatttcttttaataattctgccgtttctgaagcgattttccccataatctatcctccgtgcatgtctgtaggataatcatatcatatcatatttgcttcgtgaaacaacatacaattcccaaatatctgatatagcagtaatctttatttgttattgaatgccagattatacctatttttcgtgtatatgatatacttgtggtataatcgcgagttttgctcgcaggtctggcaataggcggcggagcgaatgaagtacaaaattccaccgcatctgcggttctgtaggccctccccggaacttcggaccctttcgtgctattcccttaaattgcaattttatatttccttccccaggaacattgtaaagtttcccgtcgccagcagttcttcttcctctccggtgatatccacccggcatacggcggtgtgccttcctttatgaacaatgttggactccacatagatcgtcccgctgtttacgccgcgcacaaagttaattccggcgcattgggtgacgttggtgacttcgcaggcgtaggtggacatgccggcggcaatgtcgcagagagagaagaggaagccgccgtgggcattgccgtacagattcagacatgcttccgtcagttctatggaaagccggacatgccccggctccacttctaatatattcaggttttcctgccctccgatgggctggatatgccgtctgatcccttccatgatttccggtcttgtaatcataagaaacctccatttgtcaaaaatatacaacttcacacgctagactataacaccctcaaaatccatttacaagtcaaaaatcgattgatagttttttccgattaattcgatacgttcgcacggatacagccgattggatatttacggacaggcacgttataataacatcatcaagattgttaaagaaatagcaacaaaataaaaaatgaacaattaaatgatcaactcaaataaggaggatatcacatgagcaagttaacaaaggaagagttccaggcttacttaaaacagatccgcgagctggcagaaggtccgttggaagagatccagaaagaagtcgaggtaaccaacaaattcccgcaggagttctacgatctggcgatcgagaacaatttataccgttgttccttaccggaagagtacggcggatggggcttaaacgagcttgaaattttacaggtacaggaagagttctccagaggaccgggcggaatgagaatgcatcttcactatgcaatggatttaaactggagaatcctggatgactatggcagcccggagctgaaagcagagtacatgtccaagttccagaacaaggaagtattcacctgcttcgcgctgactgaggcaaccggcggcaccggcgctgacttacataccatggcagtgaaagatggcgacagctatgtattaaacggcgagaagaccttgatctcccacaccgactgctgcgagttcgcatacgttatcgcagtaaccaatccggattctgataaagatgacagactttccgcattcttcgtaccgatggatgcaccgggattcgaagtgatcaacatgccgcatatgatgggctgccgcggtgcaggccatggcgatctgaaattcaccaactgccgcatcgacaagaaatatctgttaggccgtgagggacagggacttgagattgcaatgcactccttatccgtatctcgtgcccacatcgcagccagcaacctgggtatggcacagagaatgttagaactgtccctggcatacgcacatgaccgtgtaacctttggcaaaccgatcggaacccgtcaggctatccgtgtaaagatcgcagatatgtccatgatggtacacgcactgcgctgcatggtttacgatttcgcaaaggcttatatggagaacccgaccggcgagtacattgaggagaaggctgctatgtgtaagctcttcagtattgataccaccagaaaagtcagcgatgagatgcttgagatcttcggcggcgtaggctacttcgaggactgcaagtacggcccggttgagagactgtaccgcgactgccgcgccatgtggctggaagagggcgctccgaccgttcagagaattaccatttccagaaataccatcaaacacggtgctcatatggagtacgtgctgtaaatattttttcctaaacagggtcgtcaggttcctacttgggcctggggaccctgttccccctaaatgacaggcgctgctgtctgcgcagcgcgtaaacagcaatgcaatgatcggactgcaggacgggtaccccggaatgcagagagatggaggaatactttatgagacctttggaaggaatcaaggtcgttgatttaacgacttatctggccgcgccgactacggtgcgtgtactgggagagtggggcgctgactgcgtgaagatcgaatccgcaaaaggcgatccggctagaacccagggggcagtgttcaatatgccttataacgatgatgaaaacctggccttcgatgtagccaatttaaataagaaatttatcacattgaacttaaaagatccgaagggtcttgaaattgcctaccgcctgttagcggaggccgatgtgtttgtaacgaatacaagaacaaagtccttaaagaaactgggactggattatgataccttaaatgaaaaattcccgaaactgatcttcgcacaggtgctgggctatggcgagtacggaccggagaaggataccgccggatttgacgtaacctgctacatggcaaggggcggcgtattcggaaccaccgtaaaccgcggcgacgcgccgatgatcccgaccaacggatttggtgatttccaggtttccctggctctggcttccggtatctgcgctgctttatatggaagagaaaaatccggcaagggcgataaagtaaccgtcagcctgcatcacgcagctgtctatgccctcagcaccggcctgatttccgcacagtacggcaaccagtatccgaagaaccgtacggaggtcgtaaacccgttcaatgatgtattccgtaccagcgatggcaaatgggtatgcatctgctgtccggaatatgaccgtgattacgagaagatgttcaccgtgctggacgctccggagatgttaacggaggaagcgaaagagaagtaccgccgctgcgagagcatcaacgcaaacggactgaaccaggaagtagtcgcagcgttagaccgcgcgatcgcaaagttcaccagagaggaactgatggagcgcctgaaagcgaacgacatgccgtgtgaggcctgcatggagccggaggatatttacaaggacgagcaggcagcagccaaccacattcttgcaaagatcccgtacccgtctggcgagcgctttatgccgaccaacccgatccgcttcggcagcatgggcgagccggaatatgtgatcggcggatcacagggcgcgcacaccgtagagctgatgaagcatgtgggctacagcgacaaggaaatcgaggaagccattgcttccggagccgcaaccggtgagacaaaactgaaaaaattataggtttaaaaataagaaaggggaaggtgacacagatatgagcttaatgtacaccgaggaacagaaagcgctgattgctcttgtaaaagagatggcagagaacgagatcaagccttatgtgaaagatgcggatgaaaaaggcgagtgtccgaaagaactttataaatggggatttgacatgggacttcatatgctggaggttccggccgagtacggcggagctggtttaagctatgagaccaccgcaatgatcttcgaggaactggccaaggtggatgccggttatgccatcacctttgtcacttctttcgtagcattaagaaacgtcatcctggcaggcaccaaggagcagggccagtatttcgcagataaagtggctccgggcgcattcgcaggtttcgccctgaccgagccgaacgccggttccgatccggcagcgatgcgcgcgaccgcagtaaaagatggcgatgagtacatcttaaacggaaccaagacctttattaccaacggcgcggtagcaagcgttttcgtaggtttcttcaagaccaacccggcagcaggacacaagggaatttccgctttcatcatcgatgcggacgctcctggcgtaaccgttggcgctcacgagaacaagatgggcctgcgcctctccaacaccaccgacctgatctttgagaatgtccgcgtaaaggcatccgccatggtaggaccggaaggcagcggatttaagctggctatgaacgccctgaacttatcccgcgcgttcgtggcaaccctggcagtcggcatcatgcagcgcgcactcgatgagtccgtgaagtacgcaaaagagagaaaacagttcaataccccgatcatcaaattccagatggtacagcagatgttagccgatatggctatcaagatcgaggcatccagatgcctggtcaacaacaccatgaagatgatggatgcaggtatcatggttcagaaagagggctccatctgcaagaccttcgtttccgactgcgcccaggaggttacctccaatgcagttcagatcttcggcggatatggctacagcaaagagtacccggttgagaagctgatgcgcgatgtcaaagtattccagatctttgagggcgcaaaccaggtacagagactgaccatcgccaacgtattaaataaagaatacaaataggaaaaactgacaggaggattgaagatgaatatcgttgtttgtatcaaacaggttccggataccacagagatcaagatcgatccggttaaaaatacactgatccgtaccggcgtgccgagcatcatgaatccgttcgacaagaacgctctggagaccggactttccttaaaagaccggtatggcggcaaagtaacggttatttccatgggaccgccgcaggcaaaagctgttttgagagaggcactggctatgggtgctgatgaggcttatctggtaacggaccgcgcattcggcggatccgatacctacgctaccagctacatcttatcccaggcaatcaagaaactgggcgcttacgatgtcatcctgggcggcaagcaggcaatcgacggagataccggccagaccgcaccgagtatcgcagagcatctgggcgcaactcgtctgacttacgttctgagcttaaaggttgagggcgacaaagtcattgcagagcgccaggtagaagagggcgtggaagtcatcgagacgaagttcccggtactttgcaccgcaaccaaagaaagcaacaaaccgcgttacgcaaccgtaaagggcgttatgagatccttcaacaccgagatcggtcagatcaccctggcagacctgccggacgcagacaccaccaagatgggactgaagggatccccgaccaaagtaaaagcaacattcactccgaagagaaccgcaaactgtgtgaacatcgaaggcgtaagcccggtggagattgcggacaacctgatcggaaagctggttgaggcaaaagtactttaataaacagaggaggtcgtcaagatgagttttgatacatgcaaggacgtatgggtatttatcgagagcttccagggtcagccgaagagtgtcggcctggagctgttaggacagggaagaaagctggcggacggactgaaacagaagctctgcgccattgttatcggcaaggatgtagacgcagctgtaaaagaatccgcagcgtacggcgccgacaagatctatgtgatccagggcgacgagtatgagaactattcagctgacgcttacggaaacgtattcttaaagctctgtgagaaatatgatccaaacaccattttagtaggcgcaaccgtaaacggaagagacttgggatccaagatcgcagtcagcctccgcaccggcctgactgccgactgtaccgcgctgagtgtcgatgaggacaccggaaatgtagtatgggagcgtccggcattcggcggaaacttatacgcgcagattctctgcagcgagaccagaccgcagatgggtacctgccgtccgggcgcgttcaagaagccggagcgcaacgagaacaatcagccggagatcatcaaagaggatattcataccccggagagcgagatccgcaccaaagtgcttgatttcatcaaggcatgtgaggacaacgatatgcgtctcgatgaggcagatgtcattgtatccggcggccgcggcatgaagagtgctgagaacttcggtatcttaaaagagttggcagatgtgcttggaggaaccgtaggatgctccagagcagccgttgacgcaggctggatgccgcagaccaagcaggttggacagaccggctccaccgtaaccccgaaaatctactttgcatgcgccatttccggtgcagtgcagcacgtagcgggcatgagcggatctggtacgattgtagctatcaataaggatgagaccgcaccgatctttgaggttgcggattacggaatcgttggcgatgtttttgagatcgttccggctctggtaaaagaactgaaagcaaagcagcaggcgtaataccaaagaaacaggaagaaaaggctgccgacaaaaggatggaatggtctcactttttgcagcagccttccgcgtgtagaagcgggagtctggcgggacaacggcatgctggcggatgtaaggaggcacgttatgtttgaggaaaggaagatcaacccgaatctgcagaaacagtaccgggagcaggggtactggaaagatgaaacgctgctggactgctgggaccggacggtagaaacgtatccggaacgggaatatgtggtcgacgaccgtggtaaccgttatacctaccgggaactggatgaggcagcaggccgggtggcatcgtatctgataggactgggaatccagccaggcgaggtggtctcttttcagcttccaatctggagtgagtttgccatgctgaccattgcctgctataaggtgggagcggtggcccatcccattgccatgtcctatgaggagaaggaactggcaagaagcttaaacataacagaatcccggtgttattttggaccgacattcttctacaagactgattatgaagatcggatccttgcagtgcgggatcaggtgccgctgttaaaggatatcgtgctgatcgacagtgtgaaagagcgaaagagcgatgtagctttgcttcgggaaattcttacttcttatgggccacttccgaaagagcggtgtgtacatactaaaaacggacaggatatcgcggttattctttgcacctccggcacaactggaggtacgaagggagttctgctgactcatgataatgtgcgttatgcggaagaaacattcaaccgggagcttggtcttaccgaggaagatatcatgttcatgccggcaccgcttcatcacgcgactggatttcatcacgcgatcattgcgccgatgcttcatggtgcgaaagtggtactgcaacagaaatatcaatgtagattggccattgaatttatgaaccaggaaaatgttacttattctatgggagcaacccctttcatctacgatattttaagggagctggagacaaatggcggtgaaattccgtctctgaagttttatctttgtggcggtgcgccggttcctgggtatctggtacagagagcaaaacagtacggaatacttctctgcgaagtctatggatccacggaaagtgtgccacacgcatttgttcgtccggatgaggcgcttgcgctgaatggaacgacatccggaagggcaatggaaggtgtggagatccgggtggtagacgaagatgggaacgacgtaggtgtggggatcccgggagaagagttgtcaagaggacccagtgtgtttgtcgggtatttaaaagcacgggagatcacggatgaagctttggatgacgatggctggttccacagtggtgacctttgtatcatggatgagcatggaaatattcacattattggacgaaaaaaagacatgattgtccggggcggtgagaatttaaataccaatgagatcaatgatactttagagggatgccctggaatgggtgatcataccattatcggaatgccggatgatcgtctcggagaacggatctgcgcatttgcggtcccgcttcggggatatgaaaatctgaagttggaggatgtactggactatttgcattcgaagaaaattccaaggcgtttttggccagagcggctagaactaattgaccgcattccacatacgggaagcggaaaggtgaaaaaatatcttctgaagcaggaactggaaaagcgtttgaagggatgattcactatgattgaacagaaatttggaccgcgcagatgcaaggataccagaaagccactggaaaaacagtgcccagatgttatattttaccgctgcccggaatgcggagctctttatccggtgacaggaggaacgaacctggaggaaaaagaaattctgtgctgtggaaaaaaggcggaaaggctgattcctgaagaagccgactccacgcgggatgtgatggatattacctatcagatcacaggcggctataatgataatgctgtccgcgtatcgtggaagatgaagccgtatggacgtcatccagagtggatttatctgaaaacatttacggggggatatttaaaatacgtaatggaaggaaaacattcgccaatggtatttgccctggcggataccgatgccttttgttactgtgatgaagatccatgcctggaatgtgtatttcggtgtaagagaggatttatcatttatgtttatgatagacagaccggactcgttgcggtacccctggataagatgaatgcccagtggcagagtggagcaaataagatgtgagatactgtaatttttgacaataatatgttaaattagtaacgaaatctgtatatggggatgtacagataatgggggatattctatgggaaaaacaacaaatgtggaatgcaaagtagactggaaaaccgttcttgtttttgtgtcgatagcatttagttcgcagtgtggcggcggattcgcgtctggatctacgccatggacttatttttttagaaatacggggttttatgggatgctgccggttgttgcgcagccgtatttttgtctgtttatgccgtttattgtagcggcaatcaactgttttattatctatttctttatgaaattcgctatggatttccgtacatttgattacagcagttttttgaggcggtatggttcgcgtttttgcaatgggatttttgccagaccgatgcagtacatttatgaatttaatttcaactggcttctgatcgtatgtatggcgcttgcctattccacctctggttcagcattaaaagaactgacgggaattccatatctgtattctacacttattatcggtgttcttatgtttgttctgtgtatgaaaggcacagatctggtccggaagaatgcagtgttcatgagtgctgttattttcattgcgctgatgtcagttcatgtgcctaatattctatataatgtcacatccggcaggttgtcttcggaacttggcatcatgtcccaacagcttcacaacgatattgccgcaggtgcaggaagctttttaaagtatcttctggtcgctttttgctgggcgtatattttttcaggacagaatctggcaggttttggagcctatgttaatcatgcgcagctttttaccaataaaaaaacactcagatgggctgttgtgctgtctgtgattgcaaactgggcatttctggaaatgaatgtgatcaatctggctgcaaattattcggctgtttatgaaggatggtcgaatggacgtgcggtatataccattcttgttgtacaaaatggcgttggaagtggagcgataaagaccatccttcttacgctgatcactgtggccatattctttgcaaccatttcaacggcaatcaattacgcgcaaggcttcaatgaccgtattttaaactggtatcagaaaagaaaacaggaagccccggaagtttccgcggcaaagagaaacaagcggggagcagtattaacgctggtttatattgtgtttacatgggcagtgtcccagatgggactgactgcgctggtatcgaagggacttacatttgcatcgatcatcacgttgtttactctgatcataccgaccattatcaatgtcatccgaaagtggccggatgcagattatgcacacatgacaaaagaaaaatagtaatggttcagccggtctgcgtattcactgtgctgaccgcatgcaaacatggattacaggaaaaaattccattgtcgaagggtgctgtgtgccagcggcacacagctccggtcgaagcggaacggagacattttcaatgtttttttactgtgtctgtgaaggtacagaaacgttacgaaagatgatgaaatacgagggggaatcgatatgttatctgctattggattaatcatagcgatcgcgctgctgattgttatgatcgtcaaaggtgttgatatgattacggcatcggtagtaacagctgcaattattcttgtaacaagcggacttgatttttgggaaggtttactgaaaacgttttcagaaggagctggctcgttctgcagctcctggtttttaatccttgctctgggtggcatttttggtgaactggtcaatcagacagggctggctaccaaggtcgcaaaatctttatctgctgcacttggagccaaaagagtggggctgatcattatgatctgcacattctttatcacactgctgggtattaacggctatattatggtatttgttctttatccgatcgcagacagcctgcttcgtgaaaataagatggatcgccggctgcttccgtttttgatgatcgcgggaggtgcgaatgcgaatggatttgcgttttccatggatatctgtaatgtaatcccgagtaatttccttggcacttcacttggtgtagctccggtcctggcggtgattttctcagtaatcacctgcacctggtatgtaatatatttcaactatgcgcaaatgaagagcatggaaaaaatgtcggaagcagaactgatggcactgtacaaaacagaaaagagcgtcatgggggataacgagcttcctggtctctttatgtctcttttgccgtttatcctggtactggcagtggtagtggtaacttccggtatgggaacgtcaaccagcttgagctgcgcgcttttgaccggcgttcttgtgattattgtgacacagtttaaaaaaatcaaaaacctgaagggatctctgaaaggtggggcaatgtcaggattaagcacaatgctgacggtagccgcagtcattggtctttccaaggtcctgacccaggcaccggctttccatgctgtacaggagtttgtattaaatattacacttccgatttacttaaagacctggcttggaaccatgatctgtggagctatgactggttctgcgattacagcggaaaccctgtttttggagagcttcggaaaacagttccttgcagctggcgcgaatatcaatgccctccacagaattgtggtagaggctggtattactctgaacaaacttccgaatgcttcaccggtagttatggaaacttctgtctgtgaatgtacgctggcggaaagctataagcatattgtgctggggtctacgattccatgtgtgattgcaggcttcattattacaatgatggcgaccgttggaattattttttaaaagttaaaggttctgcgatacggtttccaatacaaaatcatggaaattccggacaaccggcggcatataaaactgattgctgcttatcatataaatgttgcgctttacgattggatgaaggatttcgatcactttaacattcaggctggagagcagttccatttccgggacaatggcaatgccgaagccgtgggctacaagaccggccgtgacctggtcctctacaatctcataagcgatatgagggcgttttcccaatgcctggaacattttatcaacttcatagcgaatgccggatgcttcggagaaataaacatacggatatggcagggtttgctccaggtttacggagtcaaatcttgccaattcgtgattttggggtacgatcagcaccagcttttcccgatgtacggtttgggatgtcaatccgttctctttttgtgggtgtgaacagaagatcaggtcataatgatgggcatttaagtcatttaccagattctgggtcacgtcagtctgaaaggaaaaatgaatatcgcggtcaggatgtagcctgagaaaatggcgcgccagagaaggaatcaaatccacacccagaggacgcacaagaccgagacggatcaccccttcgccgcgggcagtgcgctgaagaaaatcaatgccatcatccagtgtttttaaggaattttcaacactgcgcagaaattgttctccgaacacagtcagcacggtattttttccgtttttctcaaataatggaacaccgagttcttcttccattttaaagatagcatgactgaggctgggctgggtaatacacagattctgtgcggcgcgtgtatagtggtgcgtgtgtgccagttctgcaaaataacgcagatgagtcaggttcatgggtggactgcctttcttaaactatgtgatgatgtatgatagacaaaatctattataacataaaaataattgatttgaatataggataaaactgttttatactaaaatcggaaggtgtcataagacatttttcaggttttttcttatagaagatacggcttcttttatgtcgttcccataaaaagaagccgtaaatccccttgtgaatattccatacaattctgtataaaaatcccgatattttaagattccggaggcaagtcaaggcagtgcgctacgataaagtttgcgaacgattccacggttgccgtaataaaattttttttgctgtagaccatatagatcatgcgggtgcccagaggaacgtccgtcaaatggattttttttagattgtcaaactgtttcaaaaacggagtgttcgcaacaatggccaccttggaggaacggttgatgcgcccggcaatagagatttcatcgtcataggaataagcggcttccagacctttgtctttcaaaattttccggatggttttgccaatgggaatcgtgtcccggtaggtggacagggtatagtcttgcagatcggagagctggatggaatcgtgcgatgccagcggatggttatttcgcacaataacgatcagttcctggaaggtgataggaacaaagacaagatccgacttgttttctaccatggaacagaagccgatatcatagttaccggtggagactccctctgccaccggaatggacttttcatgaaaaatattaaagctgacctgcggatgcttttcgtggtacagatccagcgcattcggaagaaaatcccccagtagggtgggaatacagcctacatcaatggttccggtcaccaaatcggatttttctttcataatggcaatgccgtgttccaggatccccagtgcctggttcacgtactcatagaattcctgaccgtatttggtaagctggactccgcggccctttttctggaataaggaaacggaaagttcatgctccagggaagcaatggaatcgctcaggctcggctgcgtgatataaagtgctttggctgctttggtataatgctgaacttcagccagttttcgaaagtaataaagctgttgtaaattcataacctttctcctttgccatcatacattccattatacaggatgaacaggaaaaattccagaagaacgcataaaaagtgttaataaaatatcagaaacagggcgaaacggggtttgacaatttcagaaaaactgcctagaataaaggtgagtgtcagcacataggagactgaagcatgagggaaatcaagaagcatatatttctggagacaatttcatatgagaaccgccatatgagcccccgcaatctttatatcattcggggagaagagcggagtctgatggtcgatacatcgaacaatactgaacgggactggaccatcttaaagggcatgatcgatgcgctggggattgattgcagaaagctggatatttttattacccatgagcatccggatcatacaggcctggtaccgaagctgcaggagcttggagccagggcatttatgaatccggatgagacaagaaagcgggtggatctgctgcacagctatctggcagatgagcgtgcccggattgaaaatctgcggatcgtcggggtaaccaaagaggaaacaccggaggtatatgataccttcatggaatatacgacaaaagcttacgcatccgagaagagtccgctggagctttcctttattccgatccacccgggagatatcctttcgtatggcggataccattttgaggtgaagctgttaaagggacataccttcggacagtgtggtctgtacgagccggagaagaagcttatgtttgtgggagatcagctcatgaccacaattgtcccgattgtaggaacacaggagacagatctcggtatgctgaaatgctatctggattcccttggagatctgaagcataattacaaagactgttattttctgccctgtcattatggggagattaggaatgttgaaaaagaagtaaaccgcattattctggggtatctggaaaaatgcgagatcatgaagcatgttctggaggaagcgggaacggcgctgaccacgcgggatattggtgtacggacttatggacggagccagggaccgccggattacgcgcattttgcctcctgtacctatatctgggccaagaccttttcctgtatggaatatatgatgggggagggctttgtcgagagatctgagcgggacggcattatctactggaaagcgccctccatacattttgaaaataaccggtaaattccggcgcatttctgcgctttaagggactgtcatactgaggagcaaaggtgagggaaatctctgcctttacctgtccgggtcttgcagaaagaatcagcacacggtcagcggtgctgatggcttctgcaaggtcatgggtgatcaggatggcggtcttttttgtttccctgatgatcgtggcaatgtcatcgcacacggtgagcctggtctggtaatccagagcagagaagggctcatccaaaagcagcaggtccggttttaagatgagtgtgcggatcagggcagcacgctgtcgcataccgccggaaagttcggagggatgagcgtccgcgaattcagccagtccgtaattttccagcatttcatcaagtgttttcatggcggcctttgttttccggtgccggatctccagaccaagggcagcattttcacggatcgtacgccattcaaacagatgatcccgctggagcatgtaaccgatccctgcctgagcttccttgagcggagcgtcacctatatagacagaaccttcttccggagtcaaaaggccggcgagaagggaaagcagggttgacttgccgcagccggacgggccgacaatggcaagaaattcgcccttgtttacggtaaaagagatgccggaaagcgcaggggtcgcacccagcggagagtgataagcatagctgatgtcacagacgcgtaagaaaggttccatggccggtcctccctgtttttataccatattttatgaagaaaagaacgaagagttccggaaaacccttgcatttacgaaaaacaggtgctataatcccatctttgacagttgtttagtcaaataagtgccgcaacccttgtaaatacaaggactgtggcactttgagctacatacacgaaatatagtaatattttatcttcgtttactttttttctgaattcctttcatgtttcgttttgttatgaattgatagtcagttcggaatttacaggcttcatggaggtcatcggttatttcatgacgttcatataccggcatgaatccttgctcttcgacatcagcaaactttatatctttcaaagtgtgaagtaattggctggtcgtataagttccttttaaagaacgatttaataatctaaaatggagcaatgcaagaaaacaagtaagaaaatgtgctttaatgcgatccttacgggttaaataaaccggtctggcttcaaaatcagttttcatagttctaaaacaatcttcaatctgccatcttccttcacttacttttaaaatatctgcaacatcatcatcaagcaggtctgtacagatggcataaagtccatcatacatttcttcttctgcaatcttctccagatcaagataataatggattgtggctttttccccctcatttgtgacagcaaccttatttacaaatcgagcaggatcatttggatttttgcgttgcttttttaaagttccatttgcaaccattttttctgctctactgatttgctctgcacggatagctttttggtaagcagcatatttaggggagtaggttatgatcaatcgttgatgtaactttttggttgtaaaaggctcatctttatagaaaagctgttctttatcgttttctgttaaatttgtaatatcgacaactttatcatctgataatcgtttaaaatctgttttgttcaaagcccatgcccgatcttcagcaggcagctttttgattgactgagtgacaataaatgcccgttgtcccatatgattgagtacacggttatcttcggaagcaagcccggcatcactgcaataaataaatttctcacaaccgaattgttgaagaatcttagtttctaaaggcttcaaagatttctgctcattttgatttcccggaaaaagagaaaatgctagagggattccgtcgccatctgtgaaaagtcccatttggataatcgggttgggacgatgctccttgcttttcccatatttcttgtctccatcttcctgttcaatttcaaagtagtagtttgtacagtcataataaaggatccgatcatttctgtttccgaggaaaaaactgtttttataaacttccgattgaataaaatccatttctgatgcaagaacggaaagagcgcgatatacatcatgaagttcatatgttggtggttcaaggaattgttttgcagcacgaaaggaagaacttttactggaaggttccaacactcttgtatagatcaaatctgacaaaatcgcattgagatcatactcgaatttatgcctgcttttgatttttcgacagatagaatccattttcagtccataataaatggattgaagaaaaagataaccgccagaaaaaagtttctgtttatgatagtccatgaaccgatttgaatggaatggaatcataacagttgcatcttctttttcacttttatatttcagagtttcaagacgggcttgttcatttgcccatgcgagaaccccttcgcgatccgtatgaagttgttttgataaatcagccaaagtacctaatttacggattgtttttgaagtactttttccctgagcacttgtataggattgtgtaatataaaatgactcagaatttttcgattttgatgttgttacacgcataatgatcacctctgtcattattataacatatatcaccatatattactatataataaaaacaaaaatttgacaaaaaaataagcctgtttcaaggctttgcagtatcctttttaattttgatgtgtcaaactcccgacaacatacaattcccaaatatctgatatagcagtaatctttatttgttattgaatgccagattatacctatttttcgtgtatatgatatacttgtggtataatccatatactaaataagataaagggtggtactatgcagatttttgtagatgcagatgcttgtccggtggttttcattgtggaagcagttgcgagaaaatatggggtggcggtaacgctgttatgcgatacaaatcacatattgtattctgattatagtgaggtagtggttgttggagccggcgcggatgctgtagattataagctgatcagtatttgccataaaggagacatcgtggtatcgcaggattatggagtagcagctatggctctcggcaaaggggcttatgcgattcatcagtcaggcaaatggtatacaaatgaaaatattgaccagatgctgatggaacggcacttaaacaaaaaagcgcggcggagcagccagaagaatcatataaaggggccgagaaagcgcaccgatgcagatgatgaaagattttttcagtctatggaaaaattggtattgatggctatgaaaaactgttcagaagatacagagagagggcagaacgcgtgaatgagaaatatcagctttattattattggaatcatggcatgtgcgatcagtgtggagcaccaatactgattttaaatgaggcattaagctacgagggcaatgatcagcaggaattacaggcttttttggatgagcacgcagagtgccggtatttttctaataaagatgaacagaaaaattttgaagagaatggtggctgtaaaaagttggaagaaacatataattacaagtcaccatattgggccatgcgatctgtaggaagcaaatccctgctgggtcagttttgctgccgcacatgtagagaaaaatggatccgggaaagagaagccgatcatttgaaaatttatacatacttctgggaattgcgagagtacgcactgaaagtagccccagaaccatgtgataatccatctggaattgttgtgtttgatctggagactacggggttgaacagtaacgataatgaaattttacagatcagtgcggttgatggaaacggggatttacttcttaatgagtatgtcagaccagaactgatcaggtcatggccagatgcagaacaggtgaatgacatcacaccagagcgggtaaaaaactgtaagaccatcagagaactgatagggaagataaaaggcgtttttgcatcagggaaaacatggattgcgtataattgtgatttcgatctcggatttttattctttgcaggtatcgaaccaggtacgaatactgaattagaagatgtgatgctcgattttgccgaaatttgtgggaactatgataagcggtacggaacccgtcgatggcagacgttagaagcggtcgccgcacattttgggtataactataaagcgcatgattctttggaagacgcaagagccacactgtatattaggaatagaattaagcgggaaaaagaaatattagacgaattgactgccccatttcagacggtgaaaagacaatagacttaggagaaatgataccttacttgcagtgtgaaaatgatacctcatttatatcggaaacaaccccaaatttttcggctatccaagatgggtgaaaaatttggggtttggtcattcaaaatgtgcagtaaaatcaagaggattactggacttttaatgaggaaaatgatacctgat

SEQ ID NO: 3544 - DNA, 22142 bp, Unknown
  gut microbiota DNA sequence
gtaatcacatcctgcagggaattctcatactgtcgtataattttttctcttgcacgtgccacattgtcacttccgagcagttcttcgcccccacttgcgagggagacgctccagattccacctccgaaaaacgagtcgggtgtttcgtgataaagcgtcaggagaaaactgtacggagcataaagcagaaactccccgttttccttcagtgatccaatagaagacaaatcaatcccatgttgtatcaaagaggctgtcagttgcttcttctcctcgtcagacaactcgtcaaaatataatgcaccatttgtgtttaacagatccttaagatggttacggagttcatccagaaaatcgttagcatcctttaaaaccgagtctctgttcagttcgacagcctctttccagtttgtctgcaatacgttccaagtcaaattgctaagattatgttcagcgtatgaggcaaggtttcgcttctcatcgtacaggtacatagcaatttcacttgcaataagttgttccttggacagactgcattttgtaaagaaaggatgcgataagtctacgaacatagttattctgccgatttccttgctgattatcagtggaaccgtttcttttcctcctggcggcagcattgccttctgaacggaataaacgtccacttgaagggaattgctcatagtcccatctgcaaggcggatcttcataccatcactggataaagtatctaccttatccgagtgagcaagtaattcctctttggaaagcggatgattagctccacgcggactgctgcaattcttacaaacatcatcggttgcaatattcttagtcccacatactttacaagtccagggttccagtacagtcggaatctgattggctccacagaagggacaagtgacagctgaaagtggtattatcttaccgcatttttcgttcacacatgtttttggctttaagattgctccgcatgctacgcactcttctgcttccttcagattttgtgctccgcacacagggcattccggcagttcctctgcgggcggctgatcagcagattccacaagtttccaccattcaccatcatcatagaaaccaggaagtttctgcttgaatttctcatagtattccttctctgtgtctctactgatacgttttgcgctgcggctgtcagcatcccagtaacccatatacatatcgccacgaccaaaagagcggacacgtctgtatgcctggtataatttgtaaagaggagagttgttctcagaggctccgggctgacttggctgcaaagagctgtttcctcgtataaatgtcatcgccctttgccattctgcactactacgctgaaaatcctgctttaaaaaatcgacaggcacaaaatcgaggttgatctctccgacgatacgaccatactgagaatcaataggataatcttttgtcacatgcttgaattcatccacatactcaaagaaggcatttttttcaccaattcgtatggctcttccgtttcttatgagatcaattccaaaatcggtatctgagtcaaaccgctgaataccaatccacccacggactctttcttcgacggttcgaattttagtagagccgcaagaaggacaacaagtatctgatgtcccaaggattgccgtacatgtcccgcaacgttttgtgcttcctaccacctggtcaaaccgcatcaccgcaggaacatttccgctcttcctgacaacatatctgctatcatcccagacacaatgttcgtatgcctcacacttcccctcgttgataaaaatctttatttcacctttccgaagaatagtggcatatctgcgtccaatctcctctcgaattttaggaagcccatactgaaccagtttctggacaaagccgctgttagcatttccctgaggccaccagtcctttacctcaattatggttccatgactaccgggcttgaaatacggatcgtcacttgctttagctattttctctgcatcaagggaataatcctttgtgctgttgattttttcaagatcaattacagttttaacataggaatccatgtcctcacggcttgtcataaaggttgtgatattcccaagtttaccagtggaaatattaaatcccataccgaacaagccaagtgtatcgtatggattattcccggaaaaacccgcctttattgctttttcagcattctgaggtgacatgcctggcccattatcctggattctcagtattccaccattttctgacagttgctttcgggaaggaagcgtaacaatcaccataggattatccgccttcaaaccctgaatctttgctccataaaatgagtcgatagcattatcaattaactcgcaaagagcatctaacggctgcattggtgtatgcgtaagagcaattagtacctttggatcaggtgtaaaatcaaatttcattttcctgcctcctcatttaacacagctgtatttatgtaatctttaagcgtagcggccactcctttagccataaggaatggcactccgttcccgatggttttaaagcaatccgtaagcgtcatctcgggtggcaatgaaaattccttcggcaatgactgtaatgacatggcttctgctaccgatagccgtcttgccttatagggatgtaggtgtacttcgttattaccataagccacagtaggtgaatacctccacctatgaatcctcttgtatgactttttgtttgtatcaccctccggaatctcaagcatttttctgagtccagctttcggtttgaagtaccgattagcatctggatgattttccacatcgttcttttcaaaccagtactgtactgtaagttctttttctattccatcagggcattcgctaacagaaccttccacaaatggggtcatatccggccattgttcattgcggatatcctcaagggagcacttcattttcgactcccaggggaactgtaacagtgtctgatcatcgcctttaaactcctgtttgagcagtttctcggacactccaacgagcaggatccggtctctgtcctgcggaacgccaaactcaagcgaattggtaagtcgttctgttaagtagtaaccagcgttcttaagcgtcaccttcagttcctcatagaattctctatgccgtgcagtcttccataaaccctttacattttcaaaaaggaaaaagtcaggtttcattgtaataagcaacgatatgtaagaaagcgatagttttccgttatcgccatctctgccacgctgctttccggcaatcgaaaagtctgggcaaggagggccacctataaatccaacaagggaaccatctttcttagcatcctctatgtattgctccagctgatgtttattctcgttaatgtagctgttaacatctgtatttgcatatccatacttaggaggccttatcttcatcatttttcttgagtatatgtatgcgtcctgaaaaggcttaaagaactcatttacaaactctatatcatacccagccttttcaaatccaagatcgaggattccgcatccagcgaaaaaggagaagattttcaatttacgaccttttgccatttaactgatacctccgttagtttattgcactcttgccactttttacccaggcatcaagttcagagcatttgaatttccactgcttgccaatcttatgtgccggaacgcctttattatttcttatccatccgcgtatcgttcctggttttactccaaggtattctgcggcttcatcgatatttatccatttatccaaattaacatctgccatctttttacctccggtagacatttcatcatatacaaaacaccataataaagtatatcaccaagtctcgtgatcttcaatacgtttcttgttatttgtttttgttttttgtcatttacagaatttcagcaataacatatcctcgctcctgtttttcaataacaacgtgtccgcaacccctcccggaggcgtcccggatgcccaagtcgataagttcggatagaaaaaaaagtgattccagccctgggcagttgtttcgccccgtggcgggaatcccttgtttaagcctttgctgattctcgatgataatttttctgtccgttccagtttctgttgcgtagatatccacattgaagtcaccaacaccggactccgtctcatcaacggttatcgccaatccaacggcatctgccaacagagtaagattatcctcttccgcaagccaaggggtaaagtccaatgcttcatgcggccagacctttcgtaagtcttttatttcttttaacttccctaaatttatcatggtactattcctcctggtcgcaagataatcgtcttatccactcgacctattacaaaatcatcttatcaactcaaccttgcccattttcaacctgtcaactcaacccttgctttctcctggcagcaagcactcgttaggtttacgatgaccagggcaacaaacactatccaagggaatggttcgtcacacctctcgaaatcattgaagaaacgattcagttgattgtagatggaaagattgagaattaccgctatgacaccgttctgcagcaactcgtgatgctacagacaagtgcggaacagtaatactgtatcctcaaccctacgagccaaaacagctaatctgtattctcgacctaccgaaagcaaatctgtattctcaacccctactgaacagagcggttgatttgtttccgagataacaaaaaaagggatttccaccgtccggcatttgattgcctggatagtagaaatccctttatttctgggcattttcgccctttatttgcttactcttgacatcaatactacggtctcaacatgctccgtcgccggaaacatatcaaatcctactgcttccttcgccttataccccagcttcttcatataagccagatctcttgccaatgtctctgggttgcaggaaacataaactacttttttcgctcccatctttgcaatggaatccatgaactcttcggtacttccgcttctcgggggatccatgatgactacgtcggctttttcaccagcctctgccatattgaccaggaaacggccggcatcattgcagaagaaacggatattggatatctggttcattttggcgttgttgatggcatcccggactgcatcctggtttaattccacgccgatcacatttccggcctttttgcttgcaataataccaatagttcctataccacaatacgcatccacaactgtctcttttccagtcagtccagccagttccagagcctttgtatacaatttctccgtctggaccggatttacctgatagaacgaacgggaagaaatacggaagctacagccgcacagcgtatccacaatatatccttttccatacagcacatgctccttttcccccagtaccatgctggttccccgtccattgatattctggacaatggtggtgatctccggatgtttctctcttaatgcctttacgaaattattctttgacggaaatacaggagaagctgttaccagtaccaccatgatctccccactttcaaagcctctgcggatcagcacatggcgcagcaggccataacctgtatcttcatcaaatgtacggatcttaaaagactttaacatgccgcgaatagtgccaatgatctcatctgccttctggtcttcgatcatgcacttctccacaggtactacattatgagtattttcctgataaataccggaaataatattgccccttctatccctgtcaaatacagcatgaactttgtttctataataaaacggatcttccattcctatcatgtcttttacaggacagattcccttcaacaacgtttccagacgctttcttttcgtctttaactgctctgcataaggcatatccagcatctgacatccgccgcactgacgcataacaggacacatgctctttttagcgttcttctttcccttttccacgttctggccagactgctgtttcagaaccggttttccaaactttgccgccttctgtttctgctctggcctttgcttctgctctggccttacccctttcactgctctgctttccggtcttttattttcccttttggggattccctgatttttgccttcctgtacttgttttccctgtattctattttcctgggatttattcccttgaactttcttttcctgttttttctttccctgcacgtttttttcctgcatttttacacctttttcattcatatcctatcgacaatttattccttcgctcttataatcgtacttatcaacatcctaaaacaatgaggtgatatttatgagcgaaacatccacatcacaagatcccgtttcttattacattgaccatactatatacactggccgaccggcagatactaccgaccgtcttccaaaggagatacgcacctatgacctgttagactcccttgggatcacctatacccgtgcagaccatgacacactacccactatggaagcatgccaggaagtaggtaagcttttaggcattgagatctgcaaaaacctatttcttcgcaatacccagaaaaccgccttctatctgctgatccttccaggcagcaaaaagttcaaaacagccgctctctccaagcagatcggcagcgcccgtctttcctttgccgaaccggaatttatggaacagtaccttaacatcactcccggttctgtaagtgttctcggtctgatgaacgacccagaaaacaaagtccggctgctcatagacaaagatatcctggagaaccatccttacttcggatgtcatccatgtatcaacacctccagcctgaaattccgcacagaagacctgttaaacaagatcctccctgctatccaccataactataccattgtagatcttccatacgcagaatagtccatcaaacttagcagatacatctttaacgcattcccaatctgtacaaatacctgaagcagacgcaacggtcccttaaacgatcccttagatcggggccgttgcctttcttaaccactctttctcctggtcatccatatacggactgatcttctcaaacacctctttgtgatatgcgttaagaagagcaatatctctctctgtcatcagctctttcactaccgcatccttatcaactggtacaaaggtaaggaactcaaacttcataaactggccatactggttcttctcatcctttacacaaaggatcaggttctctgtacggataccatggcttccttcaatataaagtcccggttcatcagaagtgatcattccagcttccagaacaccattatcatgccgctccggcaccatacggaagcggatgccatttggtctttcgtgaacatttaacagatagcccacaccatgaccggttccatggtcaaaattcagtcccctgctccaaaatggctctcttgccacataatcaaggcttaagcctctgcacccatataaaaatttcacttcttttaatcgcagcatgcttataaggaccagagtaaaatgctctttttcttcctccgtcagttctcctaacgcaatggtacgggtaatatccgtagttccctcataatactggccaccagagtctaccagataaaagccatggtcttccagtaccgtatcactttcctttgttgcagaatagtgacacatagccgcattcgccccataagcagagattgtagcaaagcttggctcaatatagccttcctgctctttcctgaattcctctaacttatcctggacactcatctctgtaagacgctcttttccaatatggtgctttaaccagtagataaaacgggtaacagctacaccgtccttaatatgagctttcttctcattttcaatctcaacctcattctttactgctttcgcatcagaagtgggattcatcttatcaaccagttcattcttatcctttaatatgttatacaaagcataattgatatgctgcttctccataaggatcttatgtcccgtaatatctgttgccattttatagatatcatcataaggcagtatttctgtccctaaatcttccagatatttaagcatatctatattatgataattatccatatatggatatgcttctccgtgaagcacttcttcatttacaaacagatacaatttatcctctgttacgatcacgtaggaaagcactaccggattataagcaatatcatttcccctgatatttaacagccatgcaatatcatccagcgatgtcagaacatacatatctgtatgctccttcttcatttctgcacgaagctcttttaatttttcttctgctgtctttcctgcatatttctcatgtaatgcccatgccggctccatggacagtgccggacggtcttcccagatctcattgataagatcatcactgcaaaggatccttgcatttttttctttcaggcgcttttccagatcaataccggtcaatgcattgactactcttccgtcaaagcccagacagccattttccggcacttctgcttccagatatccggctacagaaggcacgccttcctgtcccattttcatcatctttacagaagttccctgaagctgtactgccgcctggacaaaatatcttccatctacccacaggcatgcttccttcatggtcactactgcaattcccgcagaaccggtaaaaccggtcaggaactgtctgcatttaaaatgatctcccacatattcggactcatgaaaatcagcagtaggcaccatataggcatccatgccacgttccttcatctttgttctgagcaattctaatttctgatccacggtcattttctccgctgatccgccatttactgtattcattttccttctcctcctgtactcacacatggctgcatattttcatctatatccatccaaaatgtctgcatgccttccagactccatcctgggcaatatcatctgtcacataatcggccgtatctttcagcttctggactgaatttcccatagcgatcccggttccggctgcctgaacgatctcataatcattcatgctgtctccaaatgccaccgtctggcttatatccattccatagtattcacataaacgtaccagtccatttgccttggatgcctgtacttctatgatgtccgcccctaaccggctggaaaataatggaaatttaagttccggaaaatgtgcctccatatcagacaccggatccgcttctccaatataagctaacgtacgtaccggcagttccagcattttccagggatcctgaaaattacgcatgctctctccccagcggatcttgtcgatccgttctacctctgccggattcacaaagtaatccttatcatcgatcgtcagccccacggcaatttccctttcttccccataggaaagcaggcgttttaaaagctctttatccataaaatgctcatataacaattcatccccggcaaccacacgggttccattcatatggattactgcatctggccgtatctgttgtttgtagcccacactgaccattccatccatatttctgccgctggcgatgacaataatactgtcttttcgcagcatctccaccgcttctatggcactgtccggtatcttccatgtagcctgatctaaaagtgtcatatccagatcaaaacttacgatccttttcttatctgttttgctgcctgtcgttttattgatcatctgaaaaactcctcattgcggtatacattaaaaaaacaaaatcggggcttttcaaacagcctcttttctgttatactataatagttatgaacatcggagtatggcgtagcttggtagcgcgctcggctgggggccgagaggtcgcaggttcaaatcctgttactccgatttattttttatcaagggtttttgatgattttactcatcagaagctcttatttttttaatcaccgttccagatgataccgaattgctccgtgctttgcactcccgcaattctaaaaacattcctaatccccttattttttcttcaaataatggcttcttactcatgtttttagcaggtcccaggttcaaaaatcctcctgcaggcaagcctgcgccggatttccgccctttttgccctggcatcatcatatagattctatcgaaaaaatattaaattatcaatatttttcacctgcaaatccaaaaacttcttaaatgttctctcggaatctttctgtacctgactttgcgagaagattttttgtcagccgcaaaggcaagtccataaaagactccggtaggacatataacagaaaaggagtgagcatgccatttcatatactcactcccaaatcctgtcttacttatttgtaccttttatgcctcaacactctcatttctatgctccatagtcctgaacaaatgggtacagatcaggatcgctactacaatggacagataatccgctgcaggctgcgcataaataacgccttccagtccaaacatatgatttaaaataaagatcaacgggataaagatcagtccctgacggcagactgtcaggagcaatgacgggatcgcctttcccattccctggatggtattgatgcacaggaataaaatccctaaaaacggcgctgacaactgcagtgcaataaccatctggataccataagtgataacctgggcgtcattgataaacacctgaaccagtgattttcttgccaccatcataaacagggtcaggatcgttcccatgatcaccgatacgatgcctgtaaacttaaacacctgcatcagacgtttcttatttcccgcaccataattatatccgatcagcggctgaattcccacacaaagtccgatctgcagcagcactaccaacatattggatttcaaggcaacgcccattgcagcaaccggtgtatctccatatcctactaatgcctgattaaggataatatttgcaaaactcattaaaatattgtttaaagatgcaggaattccaatcgctactacgctctttgcaattccttctcccactttaaaatatttccagctgatagacaaagtggattttttcctgagaaaatactgcagataaaacaggcatgctgcaatatttccaatgatcgtagccaatgctgcgcctgttactccccagcctaacatcaggatcataaccggatccagcacaatatttataatagttccaaggaggtttcccaccatagactctctggccgcgccttctcctcttaagatattggcaaatgcagtggaaaacaggatcgttggcgcaccaatggaaatgatcagcagatattttctggcaaaaccaatggtattttcactggctccgatcagtcccaaaatcccttccataccaagtacagaacagacagccacgatcactcccagacctaacgcaccataacagcaaaaggaactgatatgccatgcccggtctttatgcttttcacctaatgccctggatatagccgagcttccaccgatgccaaacagatttcccagcgccataaagatcataaataccggtgttgccaaagatacagccgcaacctgcagtggatcctgtgtctgaccaatgaaaaaggtatctgccatgttgtaaatgacaactaccagcatagatatcatggtaggaacagccatagtagccactgctttaggtaccggaactttttcaaacagatccgtattggttttcatacatttttcctctctttttcccacattttctccattgtatgctttttacattttgtcttatttttaacgtatttaagccattttgcgtaagcattctgccattctaaacacaatctgtatatttgtcaactgttatttttttgccgaggttctgctgaaattctgtcatcccattttcctgttactgagaaattcatattccaactttctgcatttttcattgctctgccactaaccttgttgtataataggtttataataagaaatggagaatgcgtatgttagtttcaacaaaagggcgttatgcactgcgtatcatgatcgacctggcagaacaccagagagacggctatattccattgaaggaaacagccgggcgccagggcatttcagaaaaatacctggaagggatcattaagatccttgtaaaagataaaatgcttacaggtgtccgcggcaaaggcggcggatacaaacttaccaaatcaccggatcagtatacagtagtaagtatcctgcgccttacggaaggctcccttgcccctgtatcctgtctggaatccccggacgcactttcctgcgagcgcatggactgctgccgtacactccctatgtggagaggcttggatcacctgatcaacaactacttagacaatatcactcttgctgacctgatccagcccgaagaaccatggagcaattatgtaatctagtccaaaagaaaaacaagcgccaccaaaggtggcatttgtttttcttggacgattaacgagggttccgtctgcgtcagcagacaatagagcgcgatagcgcgtgaacccgagtgtacatatatacataatctccaaaaaagagtatgccaccgggaatggaactccatcccgaaagcatactctttttcatttcatcttttcctacttataaagagacagtccatcaaataaaataaccggatcatcccattcattatcctttaacagggaaacttctacgcggatctgcttctgtccggatacatccacaccaaaatatacattcttttcattgtaatggatatcaggtgatgtatacagtacctggtcatcgtcaccgtaaacagttactcttgcaagaagggcgctgtcaaactgggaagaaggaccaaatacgccagataacattctgtattcaccatttgtattgcactgtacatagcttcccttgccttttaagcggatcgcatttccccagcgggatccagcggctgtcttaccggaagcaatgatcgtgtaatctttctttgtaatgccttccaggttctgtaccagataaccattttccagatccatactattagctggctctgtatctccctcatttggaacccatacgccatcttcgccaatggttcttccatcgatcactgtgtttacagccatagcaccgtttggatacaggaaataccattttccatcgtcactctttaaccatccgatctgcattgcaccagtctggtccagataataccactgaccatcgatctgctgccagccggtcttcataataccgtcattaccaatataataatattttccattatcttttatccactcattgtatgcaaacttgttggtacccttctggtatttccactgatcatttacatatttccatgttcctgcataagctggaactgttaaagccacacttaatgccagcgctgccgctgcaaccgcaaaacgtcttctcatttcccattctcctttcatctgcaggctttattcctgcgctatattaaccgctcatactgtctgttttcgtacgctttattataattcaactttgctttttatgcaacagtgcctgccatctgttcacagaatattcacggttttactgggttttctggacaatcatccgcttatctgtcacttaatcttcccacattcctgcaaattcaccgtcttttaagcgcaaaagtctctgattggaacttccccgaaagatcagggtcagatccttctttgcttccacaaactcaccatctaccaacacatcgatctgacgcagcatttcttttgtatattccgtgtaaacagagccgcctggctgcatatcctgatcaaacagatatccgctgtaacaccagatgtctttttgtggataagtctccctgatcttctttaaaaggtggacaagtaccgcctgattttccggttcaaaaggttctcccccaagaagggtaaaaccctgaatatatcccggttccagtaattttaaaattttatcctgcgtctcctctgtaaaaggaaccccatactgaaaattccaggtttccgaattaaaacagcccttacaatgatgacggcagccagacacaaacaatgttacccttacaccaggaccatctgcaatatcacattcttttatatttccataattcatctgtcatttctccatttctgttaaatatactctgcggatctaaataacataactgaacaagaagtttatctttatagtatacaccacatcattctcctgcacaagaaaaaagcaaagcccggaaatcacttccaggctctgcccttttatcttacggtatgtacaacttatctcacactcacgccccgcacttcgtgctctactttcccgagaagtttctatgcagcagctcatgctcctttccctttaaaagtgagtcataaagtgaaaggatcatcgggttttcattggacttcttgatctgggtatttacatctgtatcgtacagtcccttcattctggcctttctggttcgcggtccggcatttaccggctggccgccgcccatgatacagcctctgcggcatgccattacttccacaaaatcatactccacctcatggttcttgatctgctgcagcagcttatccgcatttgccaggccatttactactgctgcccggatctctcttccattataatcataggtcagcgtcttaattccttcatcgccccggactccgctctttttaatggcttccatatccactctgctgtgtccctgctgcaatctgcgaagtactgcctctgtgacaccgccggtaacaccaaagatcacaccgcttccggaaccaataccaaaaggcacatcagcagcctcgatctctaccttatcaaatacaataccggacttgcggatcatccttactacttctgttgttgttaatacataatccacatcctgttttccgttggtaaaggactccggccgcaggatctcttccttctttgctgtacacggcataatagaaacagatacgatcttctttccttcgttcttttccggatccttataatattcacggactaccgcaccaaacatctgctgaggagaacggcaggtggaaaggtttggcacaaattccggatattttgtctcacaatatttcacccatgcaggacagcaggatgtaaataatggcattttctgaccggaagtaaaacgctcaataaattcctttgactcttccacaactgtcagatccgcaccataagaagtatcataaacctcatcaaagcccagtctgtgaagtacacctaccagcttgcccattacattttcgccctttgcatagccaaaatgatctccaatggccacacgtacagccggtgcgatctgagcgatcacctttgtatttttatccgctaaagcttcccataccacatcgatattggtatggatactgatagcacctgtaggacagacaacccggcactggccgcagccaacgcagtctgtttctgcgatcttcttattaaatgcaggcattacctgtgcatctgttccacggtaagcaaaatcaatggcattgatattctgcacattgtcgcacattcttacacagtcaccgcaaaggatacatttattaggatccctgataatagcatgggaactggtgtcgataggctgctgctctcttacattttcaaaacggatctcatgaacacccatgcgatgagccagttcctgcagatgacattctccactcttgatacaggtagtacaatctctgcagtgggccgctaaaagcagttccaggatcagtttgcggtaacgcatcagccttggtgtattcgtatagatgaccattccgtcttttggtttttctgaacaggaggcaaaggtctttcccctgtcattttccactgtacaaagacgacaggctccatatatagataattctgaatgatagcacaatgtagggatgtcgatcccggcttttcttattactgacaatacattgggttcatctgtaaattcaatggactgtccgtcaattgtcataattcccataaatttccatcctccctactctgtatagatcgcgccaaaggcacagttgtccatacagcttccgcattttacacatttttcattgtcaatgacaaatggtgacttcacttttccggaaatagcatttaccggacagttccttgcacacttggagcagcctttacacttctcaggatcgatcttaaatacccgaagcccggaacagacatgtgcacggcatttcttatccagaatatgctcctcgtattccttacggaacgcatgaatggtactgatgaccggctttggcgcgctctttcccagtccgcaaagggcagtattttcgatcatatctgccagctcttccagctcatccagatcgctcattttcccgtttcctgcaacaatacgctccaagatctccaacattctcttggttccttctctacatggaacacattttccgcagctttctctctgagtgaaattcataaagaaccgggcaacttccaccatacaggtatcttcatccataacaaccagaccgccggatccgatcatggctccgatctttgaaagggagtcaaaatccatcttgctgtcaagctgtgactctaccagacagcctccggaaggaccaccgatctggactgccttaaactttttattatccttaatgccaccgccaatatcgaaaatgatctcacgaagagtgatacccatagggacttcgatcagacctgtattcttaacatttccagtaagtgcaaatgccttggttcccgggctttccggtgtaccgatacggctgtaccagcctgcgccatttttaatgatcataggaacattggcataggtttctacgttatttaatacagttggtttgccccataagccctgttctacggttctaggcggttttacccttggcatacctcgttttccctcaatagaagcggtcagcgcagatccttcgccacatacaaaggcaccggcgcctctgttgatatgcagtctgaaactaaagccggttcccaggatattatcgcctaaaagtcccttttcctctgcctgggcaatagcgatctgcagtctgcgcactgccagtggatattccgcacggacgtaaatatatccttcctgggcctgcactgcataagccgctaacatcatgccttcgatcatacggtggggatcaccttccataacacttcggtccataaatgcacctggatcgccttcatcaccattgcagactacatagcgtatcttttccttctgacttgccacctgggtccatttcttaccagccgggaaaccagcgccgcctcgtcctctcagtcctgcgtctgtcacggtctttataacagcttccggagtcatttcaaaaacagctttttcaaaagcctcataagcgcctactgccatggcatcttctatatgctctgcatcaatatgtccacaatttttaagcaccagacgggtctgctttgcatagaaagggatctcctcctgggtttcatatacacggccgctgtcctcatacatcagccttgttaccggctccccgcgaagaatcgttttttcaaatatttcttcacagtcttccagctttacctttaaatacaggtaattgtatggttcaatacgaactaaaggacccatttcacagaaaccgtgacatccgctcatcttaagtcccacatgtgcgatctcttccccaaattttaccgtcacattgctcatatttgcagtcagttccttaatacgggcatagatcttgtcggaaccgcctgccagacatcctgttcctccgcagatcaggactctgcaggtttctttctggcgtttttccttacattcttctctccacagatgaagctgcattctgttctctattttcataccttctcatcctcccgcaattttgcgatcagttcactcattttctccggtgtcattttcggatgtacttcatcattgaccattacggcaggcgccagtccgcaggctcccaggcaggaaacagtttccactgtaaacagctggtcatctgttgtatgtttctttttgccaagccccagttccttgtaaagtccctccaaaataggaatggacttacgcacatgacaggctgttccgtcacagactttgatcacatattttccctttgcctcaaaagagaaattctcgtaaaagcttgctacactgtaagcctttgcttctgagatccccagtttccccgcaacataggtcagaagctccggcggcagataacgatattcctcctggatcccctggataatagggatcagggatttttcttcacagctatactgtgcaatgatctggtctgtcttctcataataagatgtatctaacattgtacccctccttttgtgcatttcacgtataatcaattatacatgagaaaatgttttgtgcatagtgcttattgatatttttttgacgaaattctcaataagtataacaaactacctgaataagaaaaaagaagccccagaatttactctgagacttctctttaagttcattgattttacagatgtaatactctgtcccggatctcctgggtccttccctggttccagaactgtgttccaatataaccgcaggttcttcttgctacgaacatcttattctgatccttgtttccacaatttgggcactcccagatcagttttccggactcttcctctttgatgaccatttcaccatcgtaaccacagcattcgcagtaatcgctcttggtatttaactctgcgtacatgatattgttataaataaacttcataacagacagtaccgccggaatattgttctgcatattcggaacttccacatagcttacagcgccgcctggtgacagcttctggaaatcagactcaaatttcaacttgctgaacgcatcgatcttctctgatacgtgtacatggtaactgttggtgatgtagttcttgtcggttactcccggaataatgccaaaacgcttctgcaggcattttgcaaacttgtaagttgtggactccataggtgttccatatacggaataactgatgttctcagccgctttccactctttgcacttatcatttaaacgctgcattacctttaatgcaaatggacgtgcctccgggtctgtatgggactttccaagcattctcatgcacatttcatacagtcctgcatagcccagtgaaatagtagaatatccgttaaacagaagcttatcgatcttctcaccctttttcagtcttgccagggcaccattctgccacaggatcggtgcaacatcagagatcgtgcctaaaaggcgctcatgacggcatctgagagcttcatggcataattccaggcgctcgtctaagatctcccagaaacggtccatatcgccttcagaagaacatgctacatctaccaggttaatggtaacaacgccctgattgaaacggccataatatttatggctgccatctgcatttctctgagagtcttctactgtcaggaaagaacggcatcccatacatgggtaaacatctccctgctttaattccttcatgatctttgcagaaatataatccggtaccatacgctttgcagtacattttgctgccagctctgtcagataccagtatggagcatcctcggaaatattgtcctcatccagcacatagatcagttttgggaacgccggtgtgatccatacgcctttttcattctttacaccctgcatacgctgtaccaggacctcttcaatgatcatagacaggtcttttctggtctgaccctctggtacctcatccaggtacataaatacagttacaaatggagcctggccattgcaggtcatcaatgtgatcagctggtactgaatagtctggataccgctcttgatctcttctctcagtctgcgctctgttaccttatcaatgatcgcctcatccataggttcgccgcattcttttctttcttcgatcacatttttacggatcttctttctgctgatatctacaaatggagccagatgagccagtgtaaatgactgtccgccatactggttgctggcaacctgggcaacgatctgggtggtcacattacaggcagtaaaaaaactgtgtggcttctcgatcagtgtctcactgatcacagtaccattctgaagcatgtcctccaaattgatcagatcacagttatgttctctctgtgcaaaataatcggtatcatggaaatggataattccctcttcatgtgctcttacgatcttctccggaagaagtacacggcgggaaagatccttacttacttctccagccatgtaatcacgctgggtagaattgatcaccgggttcttattggaattttcctggttgacctcttcgttgatattatcaagcagtgataaaattccattatctgttgtattggatttacgtgtcagttccctcttataacgatagcgcacatatttctgtgctacctcgtagcctctcatagccatgatgcctgtttccaccatgtcctgaatgtcttctacatttacagcatgagttgactcctgaaccttatttgctatattatctgctatcgctctgatctgatagtcattcatctggtgcagtctgtctacttcttcattcgccttatgaactgcattaacgatcttctgtgaattaaaatgaacctcttcgccattccttttaattacattcgtctttacttcaacactcattactatccctcactcatgcacaaaatattgttgtttttcaaaccacactcactatatctagtgccatgtattataatactacaaaaatcaccgcttgaaaaggggaacatgtgaaaaagaaagaattcagacaatggcatttttttgccaccattttggtaatttgtttattagaaacgcttatacgatatgtatgttttattatcggtccctaccggaccgctcagctattatcccactaacttcctggaatgtaaagcactattttaagaaatattttaaaagatttcgggcataaaaaaacagctgtaaaatgctttccatacttttacaactgcattcatttactgcgggtaacaggacttgaacctgcacgtcgtggacaccagaacctaaatctggcgcgtctgccaattccgccatacccgcataatttagaaaaaaccgctcccttataactaagagatcggttttcattttaaatgcgggtggccggacttgaaccggcacggatgataagtccgagggattttaagtcccttgtgtctgcctattccaccacacccgcatataacaaatggggcctacagggctcgaacctgtgaccctctgcttgtaaggcagatgctctcccagctgagctaagaccccaacttgtataaattgtcttgcatataaatgcaaacgacccggaacgggatcgaaccgtcgatctccgccgtgacagggcggcgctctaaccagctgagccaccgggccatgtttgatatagttcttataacctcagtttaggaagagtggaccttcggggacttgaacccaggaccgaccggttatgagccggttgctctaaccaactgagctaaaggtccgaactatattcgtacctgctgctaagcagtaaagccgatgatcggactcgaaccgataacctgctgattacaaatcagctgctctgccaattgagccacatcggcatgatgtgtgaaccttagttcaaatgaccccaacgagattcgaactcgtgttaccgccgtgaaagggcgatgtcttaaccgcttgaccatggggccatattttatagtggtcgccatgacttccactaaactccccgagtaggactcgaacctacgacccaacggttaacagccgtttgctctaccgactgagctatcgaggaatatcaattgcgctgactggtatagtatactatacttttttgaattttgcaagcacaatttttattttttttgatacataccttcaaaaccacatattgaactgttgatcttccgaatacttacaacctttgttttccctaaaccttattggtcaagccctcgaccgattag

SEQ ID NO: 3545 - DNA, 60603 bp, Unknown
  gut microbiota DNA sequence
aactctcatgttaaaaagttgatcgaagttcggattacttagcttggctaatttatcctaaaccttcattacttggtttttgttctgaattttctcaattcaaaggtccaaaccagaccttttattttagaattttcagggttttacatactgtttaatcttcaattatcaaggttctttgttgttgtctgtctcagcagcaactcatttatgatatcacagtcgcaaccgtttgtcaacaacttttttaaatttattttttactgtttttcacagtagtttcatctggaaaaaagagcggagaaagagggatttgaaccctcgcgccggtttcccgacctacacccttagcaggggcgcctcttcggcctcttgagtatttctccgaattcataatttccttatgatgcctctaagcagacacacttgtccgtcagacgcatgtaatattatactaaagcatattacacatgtcaagagcttttttacatatttttgaactttttttacatgtctttttacaaaaaaaggacgcgctcaccgcgcgtccttaactaggcattccaaaagcatcataagatattattcttctgtatcattttcttctgtttcagcagtattatcctctgcctcttccagttcttcttcctctgcttcattgtctctggtagcactttctcttaccttggcaatgcttgcaaccttaatatcagactcctggtcgatattcatcagttttacaccggaagtatttcttccgatcacggaaatatcatctacagacatacggatcacaataccctcagtagtgataagcatgatctcacgaccgtcatttaccagctttgctccgatcaggtagccggtcttttctgttaccttatagcagagtacacccttaccaccgcggatctgtgcattaaattcgctgatcagggtacgcttgcccataccattttcagatacaactaaaagatgttcgccctggctttccatctgcatgccaatgacttcatcatcctcatcaaaacgcataccgataacacccatggaaacacggcctgttactcttacgtctgtttccttaaagcggatacacatacctttcttagtcacaaggaagatatcctgggtattatccgttgcctttacttcgatcagttcatcatcgtcacgaagtacaatggcctgaagtccgttcttgcgcacattttcgtattctaacatcggggtcttctttaccatacccttcttggtagccataaacagatatttatcctcgttcagctcgcgcattgggataatagccgtgatcttttcacctggctgcatctgtaaaaggtttacaatggctgttccacgggctgtacggcctgcttccgggatctcatatgccttgatcctgtatacacgtccagtgttggtaaagaacatcatataatggtggttggtagtcataagaaggtcctcaatatagtcctcctcaatggtctgcattcccttgatgccctttccgccacggttctggcttctgaaattgtctacgtccatacgcttgatataacctaaatgggtcatggcgatcacggtatcctcatccgggatcaggtcttccatggacatatcatcatcatagccaatggcagttcttctgtcgtcaccgtatttttcagcaatgatattgatctcttctttaattacggttaaaagcttcttctcgtctgccaggatcgcttttaactctgcaatacggatctgaagctccttatattcattttccagcttctcacgttccagacctgtaagcgcacgcagtctcatgtctacgattgcctgagcctgtgcgtcacttaagccgaaacgctccattaactgatttttagcgtctgctacatttgcagaaccgcggatgatgcggatgacctcatcaatgtggtctaaggcgatcagtaagccctgtaaaatgtgggcacgttcctctgccttatttaagtcatactgggtcctgcgtcttactacgtcttcctgatgggcaatgtagcagtccagcatctggtgcaggttcatgaccttcggttcattgttcaccagagccagcatgatcacaccaaaggtatcctgcagctgtgtatgctttaacagctggtttaagataacattggcgtttacgtcacggcgcagttcgatattgatacgcataccttcacggttagattcgtcaccgatgtaggtaatgccgtcgatcttcttttcttttaccagctctgcgatcttttcgatgagtctggctttatttaccatgtatggcagctctgtaacgataatacgtgacttgccgtttggcatggtctcaatattggtcacggctcttactttgatcttagcgcggccggtgcggtatgcttcctcaatgccacgttttcctaaaatggtggctcctgtagggaaatcaggtcccttaataatctccatgatctcctctaaggaggtctcacggtcctcatttacacggttatcgatcattcttacaaccgctgcgatgacttcacgcaggttgtgaggcgggatattggtagccataccaacggcgataccggaagtaccatttactaacagatttggaaatctggaaggtaatactacaggctctttttcggtctcatcaaagtttggtacgaaatctacggtatttttattaatgtcagccagcatttccatggaaatacggcttaaacgtgcctctgtatatcgcatagctgcggcaccgtcaccatccacggaaccaaagtttccatgtccgtctactaacggatatctggtagaccagtcctgggccatgttgaccaatgccccgtaaatggagctgtcaccatgaggatgatatttacccatggtatcaccaacgatacgggcacacttacgatgtggcttatccggtccgttgtttaactctatcatagaaaacagcacgcggcgctgtaccggctttaagccgtctctggcgtcaggaagggctctggcgctgataacactcatggcatagtcaatataggactgttccatggtctttttaaggtccacgtcatggaccttgtcaaatacattcggttccataatttatctcctttatgcgtaaatgtactctctaacatgttctctcggaatctttctgtgcctgattttgtgagaagattttttatcagttgtgcccaaatttctgaggcgtacgcagtgcgtacgttgatgaaattcgggtgcgactggcagaaaatcggccacaaaggcagatgcaggaaagactccgagaggacattaactctttcaggagtccattaaatatccaggttcttaactttctttgcattctgggcaatgaaatcacgtcttggctctacctgatcacccataagagtagtaaaggtaaggtctacttctgatgtggtctcttcatccatggtcacgcgcagtaagatacggcgttccggatccatggtagtctcccaaagctgctctgcatccatttctcccagacctttgtaacgctggatcttgttgctgttgtcacggccaatgtccatgagaatggaatttaattcctcatcactgtaagcataccatacttttttatttttctcgatcttgtataacggcggctgagccaggtatacatagccctgtttgatcagctccggcataaagcggtagataaatgtaaggagcagagtactgatgtgagcgccgtccacatccgcatcggtcatgatgatgatcttgtggtagcgcagcttgctgatatcgaagtcatcatggataccggtaccaaaagcagtgatcatagccttgatctccgcattagcataaactttatccattcttgccttttctacgtttaagatcttaccgcgaagaggaaggatggcctgggttgctctggaacgtgcagtctttgcagaaccgcccgcagaatctccctctacgatgtagatctcacagttttccgggttcttgtcagaacagtctgccagttttccaggaagtgccataccgtctaaagcggatttacggcgtgtcaggtctcttgcctttcttgcagcagctcttgccctctgtgccagaatggatttttcacacataactttggcaactgccgggttctgctccaggaaataggtcagctgctcgcttacaatactgtctacagccgctctggcctcgctgttgcccagtttctgcttggtctggccttcaaactgaggctcgctgatcttaacgctgataatggctgtaagaccttcacggatatcttcaccggaaaggctttcttcgttatcctttaacaacttgttctttcttgcatagtcattaaaggtctttgtaagggcattcttaaagccggtaaggtgggtaccaccttccggagtattgatattatttacaaatgtataaatgttctctgtataggagtcattgtgctgcatggaaacttctacataaactccctcttttgtaccttcgcagtaaagaacattttcgtataatggagcttttcccttgtttaaataagttacaaactctctaataccgccttcgtagtggaaggtttcttcttttttgtcttccctgtcatctcttaaaatgatctttaagttcttggtaaggaaagcagtctctcttaaacggatccgtaaagtatcataatcgtatacggtctcctcaaagatctccttatccggaaggaaagtaacagtcgtaccatgtttatccggactgcagtttcctactacttttaaggggtaacatacttttcctctttcataacgctgcttataaatatttccatcacggtatactaaaacttccagccactcagacagggcatttacaacagatgcacctacgccgtgaagaccgccggataccttgtatccgccatttccaaatttaccaccggcatgaaggatggtaaatacaacttcaactgcaggaagtcccgcttttttctgaatatccaccggaattccacgaccatcatcaataacagtaatagagttgtccggattaatggtcacatcaatggaatcgcagtatcctgccagtgcctcatccactgcattatctacgatctcataaaccagatgatggagtccgcgggcagatgtgctgccaatatacatacctgggcgctttcttaccgcctcaagtccttccagaatctgaatctgatctgctccgtactgctctcccatgttctatatcttcctttctttttcagacagcagacctatggtctttaaccgtttttctgcagcctgtatatctgtatgatttaattttggcttgtaacttttccctcttccaccttgaatatcttatcaatgtgaaatctatggttcacaaaatcttccagacctgtacaggtgatcatggtctggatatcctgtattgcatctaaaagctggttctggcggctgctgtcaagttctgacagcacatcatccaaaagaagcaccggatcatcccggctgatctttttcaccagctccagttctgaaagctttaaagacaaagcggctgtcctctgctgcccctgggaaccaaacctgcggatatcaatgccattgactacaaaactgatatcgtccctgtggggacctgccagtgtggtcttctgcttcatatcctgctgcctgctttttctcacagctgcttccagttcctcttcctctgtatccgggtcatagatcacttcaatgttttcttttcccccggaaagtttggtgtggagctccttaatgatgtctcccagctgatcgataaaagctcttctggcctttatcacttcttttccgaagcgtaccagctgttcatcccatacatccagtgttgcctcatattccggatgaaaaccaagctcttttaaaagtttgtttctctgaagaaggactttgttgtactggaccaaggaatggacatacactttatctaactggcataattccatgtcaataaagcgtcttcgctccgaaggaccatttttaatgatatttaagtcttccggtgagaaaaacaccacatttacaagaccaaacagctgactggcctttctgatcggaatgccgtctactgcgatccccttggtcttatttttctttaaatgcatatcaatgcggcaaggaaccgcaccttttttgatctgaagcttaatgtgggactcatcttctccaaaccggatcatatccctgtctttcgcccctctgtgggacttggtagtgcagcacacataaactgcctccaggatattggtctttccctgtgcattgtcgccatagagaatattggttccctgactcaattccatatgcagttcttcataattgcggtaattcttaagttctatggattcgatggtcatagaaattctctttcaaggatttatttaataattttgatggtctggccttcataggtgacaacatcaccatctactaacttctttcctctctggaaagcctgctcaccatttacatatacaaggccgtcttcaatggcatattttgcatctacaccggactcaacgaagccggcagcttttaatgcctggcccagtttgatgtattcatcccttaactttatggtttccattctttttgcaattcctttctgtccgtgttttacggacactctatagattaaaatgcataattatacattataccgcagctgcattaaagttgaccggaaggatcagatagatgtaggttgcatcctcgtccttgataaagcatggggactttggattcatcatgtaaatattgatctcttcatcatcgatcacacggagggcatcgatgagaaacttagggttgaaaccgatcataatgtcctttccggttttatggatcatcagttctgcgttcatggaaccaaagctggaatttaactttaattccatggtattatcgcctacatttaagatcagaggctttttatcattttcacggatcaaaatggtagcacgctcaatacagtctaaaaattcttttttattgatcgttacttttgtttcataatcgctggaaagcatctggttgatgcggaaatattccccttcgatcagtcgggaaacaacaatggtctggtcaaattcaaataaaatatggtttgcgctgaagtagatcagcacttctttttcattgtcaccgcctaagatcttgctgatctcgcttaatgtttttccaggaacgatcacttttgtattttcatagtgatcttttaaggtaacattgcggatggagatgcggtggccgtccaaagataccacttttaactggttttcattgacttcaaataattcaccggccatcattttattgctgtcgtttggtgaaatagagaagatcgtctgctggatcacttcttttaaagtgaactgggacagactgatatatttatttttttcaatataaggaatgtaggaaaattcatctccatcacgaccctggatattgaatacagaattttcgcagctgatggttgtgttgaatttatcgtcagattcaatggtaaccactgcattctggctggatacacgtctggtaatttcggaaaaaagctttgcatccagagcaatctttccgtgttctaagatctcaccatttacagttgtttcgattccaagttccatatcattgccggtcagcttgatctcaccggaagaagcatcaataaggatacattctaaaattgacatggttgttttagagggaacggccttcataacaatactgatgccgttgacaatatcatctttctgaaatctgagcttcataattgttgataacttcctttctgagttgttcgcatctggttgccctcggatagggtatataaagaattatttttcgtagaaaccgtagtaggggttgtgggtatgtgtaaaagtggaaaaaccccagaaaaacagtggaaaagctctgtggaaagctttgtggaaatcatccacatttttatggaacatcctaaaagttatccacagagtaaaataaaaaaatttttcacaaaaaaccggccccgatctatcaacagtttgtccacagtcttttcacaggttattgtggattgatcttctttttcaggatctcaatggtatttttaagattttcgtccttattcatatccgcagcgatcttttcagaaccgtggataatggtagtatggtcacgtcctcctaaaatacggccgatggactgtagaggagtttctgtcatattgcggcagagatacataacgatctggcgcggataaacgatctctttggtacgtttctgggaagaaatatcaagaggcgtaatgccaaaatgatcggaaacgacctgaatgatcaggttcggcgtaacttcccgctgggcatttggggagatgatgtcttttaatgcttcttctgccagacctaaggtaatatcgcatttgtttaagcgggagagggcaacgatctttgtaagggcgccttccagctcacggatattggatttgatgttggttgcgatatatttgatcacttcattatcaatattgtagccttccatttcttcttttttacgcaggatggccatgcgggtctcataatccggagactggatgtctacagtaagaccccattcaaagcgggaacgcagacgttcttccagagtttcaatttctttcggaggtttatcggaagatatgataatctgcttctttgattcatataatgtattaaaggtatggaaaaattcctcctgggtactttcctttcctataatgaattggatatcatcaataagaaggacgtcattattgcggtatttttcacggaattccgtggtggtaatgttgtttttgttacggatcgcatcgatcagctcgttggtaaaggtttcagagctgacataaaggatcttggcgcttgggttgttttttaaaataaaatgagcaattgcgtgcatcagatgggtttttccaagaccaacgcctccgtagataaaaaggggattgtagatctctccgggagattccgcaactgcaagggctgctgcatgagctaagttgttgttggaacctacaacgaaggtatcgaaggtatattttgggtttaagttagcactttggatcacatcagggcttacaactgctttatttttctggatgagggaaggcgcttgcgcctgtttttcttcctcgatctggtcctttaccttaaaatccacatcacagtcctgatctaggaattctgaaatggtaacttttaataaaagaccgtatttcttttttacataggccaaaaaggtctgttccggaacgatgatggtaacggtatttcctttaaaagaataaggggtcaatggctgaagccatgtccggtaggaaacatcggatacttcatgttcttcttttaaaatcagtaggattttttcccagttttctttaattttatctatcattttctgtctcctgaaactgtagtgcagaattgcccaatctaagtacattgtatactaaagccgtttttttttcaatcaaaagtgcaaaatattgtggataactttgttggaaagctgtggatgaaggcaaaaatggcaaaaaacgggcaggttttccacaaagagtggataaggaaaagagaaagttgtacacaatggtaaaaaccaggaaaaaaaggggatccggacggaacactgtggatgagaataaggttttccagaacttatccacaacttatcaacaaattgtggataatgtgagcagagatatacacggtacacacaggggcatctgtccacaattttttcccagttttcctcaaaaaatcccttgactaaggccgattttttctatataatcgagaagatgtttaattatactagtcgaaatgtgtgttaccacattagcagataatatttgataggaggtgcccggaatatgaagatgacatttcagcctaagaaaagacagagagcaaaagttcatggcttcagagctagaatgaagacagctggcggtagaaaagttattgctgcaagaagagcaaaaggtagagctaaattaaccgcttaagaacattgagaacagtaaggccacattttcaggatgtggcctttttgtttagctaaatgaaaaggagtttctattctatatgaaacgatttccttccattaagaagaacagtgactttcagaatatatacagaaatggaaagtcctatgcaaaccgtctgcttgttatgtatgtaatgagaaacggggaagagtcaaaccagcttggtatatccgtgagcaaaaaggtaggcaacagcgtggtacgtcaccatattgccagactgatgcgggagatattccggctgaataatgaaaaaattgagactgggttaaacatcatcgttgtggcaaggactgccgcagcaacatcagattacaaacatttggaaggtgcgtacatgcacctgtgcggactgcatcatattttaaaagaatcgaagtgaagtagatcatgaagattgtaaaaaagacaatgatcctgatgataagggggtaccagaagtatctttcccctcttaaaataaatactcactgtatttacacacctacgtgctctcaatacgccattgaagcactggaaaagtatggtgtgtttaagggtacatggttggcctgcaagcggatccttcgctgtcatccctttgcagaaggcggttatgatccagttccgtagaaaaacgagcacagcaggtgctccataaggaggtagcgttttgaacagtttagctggcgcagttgttttgacaaaaacaggcggtattctggggccaatcgccgggatcttaggctggatcatggatttattattccgttttaccagcacattcggcattgagaatatcggtctgtgcattattctgtttacactggttacaaagctcttgatgatgccgctgaccatcaaacagcagaaatcatccaagctgatggctgttatgcagcctgagatcaatgcgatccagaaaaagtacaagggcaaagaaaatgaccagaaatctgccatgatgatgcaggcagagatgaaagcggtttacgaaaagtatggtacatctatgacaggcggatgtctgccactggctatccagatgccgatcattttcgctttgtaccgtgttatctataatatcccggcttatgtacagtctgtaagaggatattatgaaaccgttatcagtcagctgccggctggttatcagacacaggatgtgtttacacagcttgcacaggcatgcagaatgactggcgacaaatttgattttactaacgtaaatacagttatcgatctattatataaattcactgcacagcagtggcagacctttatcggtgcgttccctgctgcaggtgaagctgccgtagaaggtggtgtgaacgcagtacaggccattgagaagatgcagaacttctttggactgaacattgcatatacaccatggcaggtgattacgaatttcttcagcggcggtacaggaaccatcacaatggtgatcgcggctattgcaattcctgttttagcaggtgccagccagtggtacagcactaagctgatgactgcaaaccagccaaagcaggtggaagaaaatccaacttctgatatgatgaagtccatgaacgtgaccatgccgttaatgtctgtattcttctgctttacctttgcttccggtattggtatctactgggtagcacagagtgtgtttaccgttatccagcagatggtcattaattcttacttaaataaagtagatatggacgagctggtacagaaaaatgtagaaaagactaacaagaagcgtgcgaaaaaaggacttccgccaacaaaggttggaaacgtggatgacatgctgaaaaagtatgaagaaaaggaatcccgtgaagaaagcgcacgtatggctaagatcgcaaagagcaaggcccaggtggaagagtccaataagtattataatcaggacgcaaaaccaggaagtctggcttccaaggccggtatggtagcgaagtataatgaacgccaggagaagggcaataaaaaataggaggtttgtttcgtatggatatgattacggttactgcgaaaacagtagacgaagcggttacgaaggcgttgatcgagcttgagactaccagcgacaagctggagtatgaagtggttgacaaaggaagtgccggatttttaggaatcggtgcaaaaccggcgatcatacgtgcaaaaaagaaagaaaccgttgctgacaaggcaattgagttcctgtcccagatttttgatgccatgaaccttgaggtatctattacagctgcttacaatgaggaagagcaggaaatttccctgaacttagagggagaggacatgggaattctgatcggtaagagaggacagaccttagactctttacagtatctggtaagtctgatcgtaaataagggaacagaaggttatctgagagtaaaactggatacggaaaattaccgtgaaagaagaaaagagactctggaaacccttgcaaagaacattgcatacaaggtaaaacgtaccagacgtcctgtatccttagagcctatgaatccttatgaaagacggatcatccatgcagcagtccagaatgacaagtatgtgaccacacgcagcgaaggagaagaacctttccgccatgtagtcattgctttaaagaaggaagctgttactactgagagaaaaggaagatatgacagagcaggcagaggccgttctgatcgttcttatggctataagggaaacaaccgcagaggcggttcttaccagtctgcaccaaaggcagagcctgtgactgaaacagttagtgaaagcgcacaggagtaatacaaaattaattgagagattaatgagaaaggctgttgcataagcgacagccttttttgtataataggggaatgaaatgagggaaaatgaatgaaaacagataccattgcagcgatagcgacgggaatgagcaattccggtatcggtatcgtaaggataagcggtgatgatgccttacaggtaataagccgcatttacagaaataaaaagggagagccaaagaatctgagccaggtgaagtcacatacgatccactacggttatatttatgacggggaagaacgtttagatgaagttctggtgatgatcatgaaagggcctaacagttatacagcggaagatacagtggagatcgactgccacggcggtgtctttattgtaaagaagatcttagagacagtgatccgaaatggggcaaggacggcagagcctggagaatttacaaaacgtgctttcttaaatggacgtattgacttagcccaggcagaggcagtggcggacgtgatccagtctaccaatgaatatgccttaaagagttccgtaagccagctggcaggctctgtttcacgaaagatacgggaacttcgcgaaaaaatcttatatgagatcgcctttattgagtctgctttagatgacccggaacatatttcattagacgggtatccagagcgccttttggcagctttggagcctatggtaaaacaggtggagcggcttttagcctcctgtgatgacggccgggtcatgtcagaaggcattaagactgttatcttaggaaagccaaatgcaggaaaatcttcccttatgaatgtgcttttaggggaagaaagagccattgtcacggagatcgcaggaaccaccagagacaccctggaagagcatatttaccttcagggcatcagcttaaatgtggtggatacagctggcatccgtgatacagaagatatagtggaaaagatcggtgtagagcgtgccatgaaggcggcagaggatgcagatctgatcatctatgtagtggatggctccagggcgttagatgaaaatgataaggagatcatggagtttatcagggggcgcagagccattgtcctgttaaataagacggaccttaagctggccgtagataaggatgagttagaaaatgcctgcggccatgcagtgatcccgatttctgcaaaagaggagcagggaattgaagctctggaagaagagatcaaaaggctgttctaccacggaaaaatatcctttaacgagcaggtgtacattaccaatgttcgccataaagaggcactggaacagacattagacagccttaaaatggtaaaacagagcgtatcagacggcatgccggaagatttttactccattgatctgatgaatgcttatgagcagcttggaaagatattaggagaagcagtggaagatgatctggtaaatgagatcttttccaagttttgtatgggaaagtagtcacggggaatatagaaacaggaaggaattaagaaaatgccatatttggaagaaacatatgatattgtggtagtaggtgccggtcatgccggctgtgaggcagcgcttgcctgcgccagactgggccttgagaccattgtatttacagtcagtgtggacagtattgccctgatgccctgtaatcctaatgtaggtggaagctccaagggacatctggtaagagagctggatgcattaggcggagaaatgggaaagaacattgataagacctttatccagtctaagatgttaaatgagtcaaagggaccggctgtccactctttaagggcccaggcggataagcaggaatacagtcgtcagatgcgaaagaccatggagaatacagagcatctgaccatccgtcaggcagaggtttctgagctgatagtcgaggacggccagattaagggtgttaagaccttctcaggggccatatatcacgcgaaagcagttgtactgtgtacaggaacctatctgcgtgcaagatgtatctacggggacgtaagcaaccctacgggaccaaacggactgcaggcagctacccatttgacggactccctgatcgcaaacggaattgaaatgttccgttttaaaacaggaacaccggcaagagctgacaagagaagcatcgacttttcaaagatggaggagcagtttggagataagagagtggttccgttttctttctctacagacccggaaagcgttcagaaagagcaggcttcctgctggctgacttataccaatcaggagacacataagatcatccgtgataatttaagccgttctcctctgttctcaggagcgatcgagggaacaggaccaagatattgtccgtctattgaggacaaagtggtaaaattcccagataaagagcgtcatcaggtctttgtggagccggaaggactttataccaatgaaatgtatttaggcggaatgagcagttctcttcctgaggatgtacagtatgcaatgtaccgtactgtaccgggactggaacatgtgcgtatcgtgcgaaatgcttatgccattgagtatgactgcatcaattctttgcagcttaagtctacactggagtttaagaagatccgcggcctgtttgcaggcggtcagtttaacggaagctccggttatgaggaagcagctgtacagggctttatggcaggtgtaaatgcttctatggaagtccttggcagagagcaggtggttctggaccgttcccaggcttatatcggcgttctcatcgatgatctggtgaccaaagagaaccatgaaccataccgtatgatgacctccagagcagagtacagactgcttttaagacaggataatgcagatctgcgtctgcgcgagatcggacataatattggccttgtaagtgatgaagaatatgagcatcttcttgagaagaaagcacagatcgatgcagaaatcgagcgtcttgaaaaggcaactatcggcggtactccaaaggttcaggaacttctggctaagtatgagagtacacctcttaagtcaggaactaccctggcagagctgatcaagcgtccggaactggactatgagaagctggcagaggtagatgaaaaacgtccggaacttgcttttgatgtgcaggagcaggtaaatattgagatcaaatacgaaggttatatcaagcgccagatgcagcaggtagcccagtttaagaagttagagggcagaaagctgccggaaaactttgattatgcccaggtaaacagcctgcgaaaagaggctgtacagaagttaaataagatccagccgtctaccattggacaggcatccagaatttccggtgtatcaccggcggatatttctgtattaatggtatatctggagagaagcaagagcgaagcttaaggaaaaaatatgcacccgcgagagttctcgcgggtacatgctggtatgagaggttaaaaatttatgacagaacagtttgtccggaaaatggaagagggagtaaaacttttgggcatccagctaagcgaaaagcagctggagcagttttacgattacttccaatttctggtagaaaagaataaagtaatgaacctgacggccattacagaagaagatgcagtaatcacaaagcatttttgcgacagtctgtgtcttgtaaaagggttttctgacattgagaaaacggtttcgttgattgatgtgggaacaggagcaggatttcctggcatcccattaaagattacttttcctcatttgaaggtcactttattagactctttaaataagagagtccgctttttagaggaagtctgtgagcgccttgatcttgaaaatgtcacctgcgtccatgcaagagcagaggatggaggcagaaataaggatctcagagagaaatttgatctgtgcgtatcccgtgcagtggctaatctgtcctctttatcagaatattgtatgccatttgtaaaggtggggggatattttgttccttataaatcaggagatattgaagaagaactggctcaggcaaagaaggcagtggcaatattaggcggagagatcgaaaatgtgactggatttgagcttccgggaggcgaaggatccagaagtctgatcaaaattaagaaaatgaaaccgatttcagcaaaatatccaagaaaagcgggacttccaggaaaagagccactgggaacaaaatgagcatgaaatcggttacatgcagatgaaaaacacatatttatcagattattatatcaaatacgcattaaaaatcagactattttcattgccattgcggtcagaaacatctgagacaatcaaatgcagtgataataaaagcaataataaaataaaacgatacattaagaaaaaggcagaatgcaagttatgaatatcaaagaaatggcaaagcttgcgggagtttcctgcgctactatatccagagttctaaacgactctggatatgtaaaggaagatacccgcaagaaagtaatggggatcattaaagaatacaactatacgccaaatatgattgccaggagtctgagcagtaaagacagttttacgatcggtatgattatcccgggagtgggagagaagcagtatggaaagatattagaaggtgcggcaaaagaaacagcaaaacatggctacagtcttgtttttatggacagcgaaaatgacctgaaaacagaaaaaaagtggctggaagaagtaaaaaatcagcatatgaaaggccttgttttagtgcctgtgcgcagtgaaaataaagagttgagaagcattttacaggaattagaagccaacggaacagcggttgtactgactgaaaaagacgtaaaaaatgcaggaatggatggcgtttttgcagacgaattccgtggcgcttatgagggcatctgcagactgatcgaaaaaggctgcaaaaggattgggattgcagtaggacagatggaaaatgatgcagctacagaggagcggtacagaggttgtgtgcaggcgttagaagataatggaattgccctgccggaagaactgatcctgcgggaagtagaagatataaaccgggtattgcagggaaagaaacttccggatgctctttttgctttaaatgaaacagcagttggacagtgctttaaggagctttttaaagggaaaaaacagggaacagaaaagatcctttttatgggaatggatgctgaaaagacggcaaaactcttagaggatgaaatgctttccgtagaaagagatggacggaaacagggaaaagaagcagtaaagctgcttttagaggcgtttgatacagaagaaaatgaccggatccggggaaaaagagtaatgatcccttataaagtaacaggggtataacagtctaaaataattcgccaaagcctggaaaataattaccagggactttggcgaaggatattttttgacttactaatatttccatgcttcccgcatcatatcaatttcttttgcatatccagccagatcattaggcgtttccagatagaagggaagatgagccagcgccgggtgattgatcagtctctttaaagaggtcaatccaatatgaccttctcccagtctggcgtggcggtctttatgggctccaagaggatttaaactgtcatttaagtgaatggcttttaaacgatcaagaccgatgatccggtcaaattctgaaattacttcatctaagtgatctgcaatatcatagcctgcatcccatacatggcaggtatctaaacatactccaagttggctgtttaaccccactttatcaataattgcttttaattcttcaaaggttctccctacttcgctgcctttgccggacatggtttccaataggacagtagtagtctgatcgggctttaaaatctcatttaacatatcggcaatataagaaatgcctacatctgcgccctgtcttacatggcttccgggatgaaaattgtaaagatttccaggggtaaattccaaacgtgccaggtcatcggccatcgtgcgtctggcaaaatcgcggagagccgggtctgcagaacagccgtttaatgtataaggggcatgggctaaaaatggatggatatcatttttatctgtttccaccagaaaacgggcaatgtcttcctggtccagcgcctttgcattacctcctctgggattgcgggaaaaatattgaaaggtgtttgcgtggattttcagggcatcttttgccatagcacagtaacctttggaagatgataagtgacagccaatacgaagcataagtggtacctcctaaacgggttgatgtagtgatcttgtaacagtaaaaaagaacagccataaaatgtttcacgtgaaacattattatggctgctgtgaaacaaacctatgaacctgtaatttgaaaattaaatagtggatgtttcacgtgaaacatttttcaaaacaggtgttattctaaaaatgtttcacacatttcgtgaaacgcagcaggtgcttctaactgaggtaaatgtttggtatccgggatcataatggactcaatcgctggattgtaatttttatattcttccaggattttctccattccggtcagatgatcgccgcctaaaagatagatgctgttatcgatcttctttaaagcattgatgatgttgcacttggtgtagttacatttgacactggcatatacagatttaggagagtcgcctaaatgtgctgcttcgtagtaagcgtcaatatcccgggcagtgacagagtacggattagagaaatagtgatttttaaattcatctgcaatattctgacggctgcttgcaatgtggtagatcagggtgcctacgatcggcagatccagaatgaacttgtaaagtttcgcgttctttccaggtaccatactgcaggagagcagggactccgggttgaccaggatcagacggtcaaataattccggagaatttccacatgccataactgccagagaagcagcagcaccggtagctacaatgtctgtgcggtgaccaatctctgatttgatgaaatcggagagcagctgcacatacagatagttggtgtaagtgaggttgggcttttcggaacgtccgaaacctaacaggtcaatggtgtatacagtatggttctttgcaagttctctgcggacggaatgccattcataactgcaggatgcaggtgaaaggtcgtgtacaagaaggacaggtttcccttcgccgatctttgtataatggatattgcccagacgccagcgataacagagagagacgcggctctctaaaatgtgctttgatacagcagaaagtttaactgctttattgatcagcgcagtagtagtagcagcgccagcagaaaggataagtaaggtcagtaatttatttcttgttttcatttagataatctctttcttccttattataatagtgatgaagtaatgtggtatctaaacagtattataatacaatgggtacgctattacaacggacaaaagatttaagaaaagttgatggaaagttgtgaaactatttatatgtttcacgtgaaactttttgctataactataaagttgtgctataatcgtttttgacggtcagaaaatgaatgtttttctgagaaaggatgtaaaaaatatgggacgaattattacaattgccaaccagaaaggcggagtaggaaaaactacaacagcaatcaatttatcagcttgtctggcagaggcaggacagcatgtaatgctggtagactttgacccccagggaaacgccagcagcggactgggagtagaaatagaagaacacgaacatacagtatatgatctgatggcggaggaggccggactggacgaatgtctggtaaagaatgtacaggataatctggatgtacttccttctgatatgaacctggcaggagcagaaatcgagtttcaggaaatagaaaataaagaaacacttttaaaacgttatctggatcaggtaagagatgattatgattttattctgatcgattgtccgccatctttgaatatcctgacaattaatgcattgacagcagcagatacggtactggtaccgatccagtgtgagtattatgctctggaaggattaaatcaggtattaaagacagtagaactggtaagaaaaaaattaaatccacagctggaactggaaggggttgtatttaccatgtatgatgcccgcaccaatttatctttgcaggttgtggagagcgtaaagagcaatttaaatcagaccatttataaaactattattccaagaaatgtaagacttgcagaagcaccaagtcacggtaagtccattaatctttatgacacccgttcaacaggtgcggaaagttatcggatgctggcagcggaagtgataagcagaggagaagagttataatggcaaagaagggattaggaaaaggcctgggggcgattttcggtgaagatgttgtaaaagagagcaaagaagagcttgaaaaagcaaaagcgaaaagggcagctgctgcagaggagatcgatgaaaaaggacgcatccttatgctcaaactggatctgatccagccgaataaggaacagccgaggaaaacatttgacgaagaacagatcaatgagctggcggggtctattaaacagtatggagttcttcagcctcttctggtacagaagtcaggcagcttttatgagatcattgcaggggagcgcagatggcgcgctgcaaaagcagctggattaaaagaagttcctgcagtattaaaagaatacagcagacaggaagcaatggagatctctctgatcgaaaatgtacagagggcagacttaaatccgatcgaagaagctttggcttatcagcagctgatcagggagtttgatcttacacaggaagagatcgctgcccgtgtggcaaagagccgtgttgctattaccaataccatgcgccttttaaaactggatgagcagatccagaatatgctgatccagggtgtgatcaccagtggacatgcaagggctttcctttcactggaggacaagggactgcagttaaaagcagcaaaagaagttctggacaaaaagttaagtgtccgtgaaacagaaaaactggtaaagcggatgcagcgggaagcagcgggagagaagaaagaagaaaagaaaccggatgaagctctcacactgatctaccaaaatctggaagacagaatgaaatctgttatgggaaccaaggtaagtatacataataaagacaaaaataaaggccgaattgaaatcgaatattattctgaagcggaactggaaagaatcgtggaaatgatagaatccatcggctgatcgacagaaggagaatgatgcattcatgatggaaaccagtattttaaatcagcttccgtttgatccgggatttcttattttgggattgatcggtttagtgttaatattactgatctttttgatctccactatggtacagttaaaaagtctgacccgcaagtatgattattttatgcggggaaaagatgcagaaacattggaagatgtgatcatggatcagattgaagagatccgaaacctgaaagcagaagaccgggcggcaaaggattccatccgtaccttaaaccgtaattttcgcgcatcctttcagaaatttggaatggtgaagtacaatgcatttcagggaatgggtggtaatttaagctttgtatttgcaatgctggattatactaatacaggttttgtactgaactgtatccacagcagggaaggctgctatatatatatgaaggaagtggatcggggacagacagatgtagtccttggaaatgaagaacaggaagctttggaacaggctttgggatatgtagagaaaaagcctgaataatgaatttttatagatactctgcaacatgtgtttgtttcacgtggaacagagtatctttttttgttttataatacttagatttataatacttaactaaaacttcccacacctaaacagggcttcgcaccttgaaaattcaatatttcagctaacaaaatagtgctttatgctattgcaacctctggatgaagtgcattacgcagatattccggcaatcttgcctcaaaatcaacagtaaaagcagtcagttgtttatcgctgagctttaagatttcctgaaggcttgccattaaggcatccatcaagatgcaaagtgacctgcggaaagtaatgtctgccatttcatcaatgagaaagaagaataactcaccaagagttctctgatcttcgttttggcgctgttccattgcaagcaacatatatctagtaaatacaatgaccacatgggctgtcagcgcatcataagataagctatggcattctccaatcaggttcagcatggatttgcaggtcttgaagaaaacctcaatctgccaacgttttccataaacacggatgatttcttcctcagaaagagtcgtatccgtacagataaaagcaagccaatccttgcggttcgatttgttccttacgcatacgattttcgccggaattggagtttcttttcctaccataacatcaacagacagcagatattttgatctgccatggcgctttttgttcttggaatagatttctttgatactcagctgtttaccaccgtatgagtatttaatccggctgctcttcttgatcatagcaatcacatccatgccttttgaatggatggctgtgatctgcaccgggtttgaaaaccaggaatcaaacagaacatagtcagcattcagtcccacgctgagggcagtgtccagcaaagccatcattgcttctggagcttttgtctgagcaagcttgcgtctttttcctgcaagggttctgttatcaaagtcctttaccggaccgatgatatttgtagtttttgcagatgccagcagacagctgtttacaggaatcaatgtatttccatcactccagcttaaagtaagcattcggaatccttttttgaaacgcatatccgtgtggtcaaaaacttttgatcccagttctgttttcttgcagctggtgcggttaaaaagactgtcatcaatgatgaagacattttttctgctgtcattcgtcagacctttgatgtcgtgatttacgatatctgcagcaagaagagaagtgaaacggagccagtttgtctttgcagaattaaggaaacggtagaacgtgttcttggaaaatgcttccttaaaagagccggtctgttgctgcatatacatacttcttccgacaaaaatgttactgagtttgtaacgaaacagagaaaccggagaaacgcctttttctttcatgccattacatctggcaagaagcttgccgacatggtgtttagaaaaaaatctctgaacgcagtcaattagggctttttcatcagaatggttttgtggtatactggacatggcataaatctcctttgtaaagatggtttctagtcaattccattataccaaacggaacaggtttatgccttttttattggctgaaatattgaattttcaaggttcaacacaccacatcggtgtgggaagttttagtacttaaaaaaagattaagttgtagtttcacaggttattatataaaatgaaagggaccgtcaaaacaggcggctgtataaatgggctgagtttaaaggactgaatgatatgaaaaaaataatacggacagcagggatacttacaatggtatttgccgcatcggtggctgtgtatttctttgctgcaagaaaaaatatgcaaaaggaagaggctgtttattcttcaatggatgcgcctgaatttcctgtggtgtatacagagtttgatggaaaagagatcaatgctcttcatggatacattcaggatatgggaaaccaggtggcaggagagagtatttccgtacttcctgaggacagaaagctgacattgcatattgatgaatatgataatggaatcacagggatccgctacgaagtgcgcaatctgggaatggaccgtttgatcgaacggacagagattgataactggcaggaagaaaatggaagtttgcaggtagtgcttcctattcaaaatctgctgacacaaaatgaaacttatttgctggatcttacagtaagtacagcagaaaaagagatccattattatacccgcattatgtgggctgataccaaccatgcaggagatatgttggatctggcagaaaatttcaccagaaaaagtctgaattacgatgaggcgaaagaactggtgtcttatctggaaaccaatccgggagaggataacagctctttaggcaatgtaagtatcaaggcaagttttgatcatcttacctgggacggattggaaacagaactggagggagaaccgcagatcacattgcagctgtacgatgggatcatggggcaggtccaggtagaatataatgtgtgggtcacagacagcacaggtaatcgttccctggtgcggacagaagataatttcactatgaagtggaatgataagagaatttacctgatgaattataaccgttatgccaatgaaatgtttaacggggaacagaagaattttgcgggaaaaaggatcctgctggggatttcggatgcaaagcagatcaaggcgcagaaaagcgaaaattcccggtatatcctgtttcgtgtaaatggaaatctgtggcgctatgatcagcatgataaaaaagccctttgcatgtttactttcgcagatggctccaatgatgatgtgagagcggattatgggaaacataatgtgaaagttttggcagcttcagatgaaggagatgttgattttcttgtatatggctatatgaaccggggaacctatgaagggcagatgggagtggtattttaccattatgatgaagacagtcgtacagtacaggaaaaattctttgtgcctgtttcagaaggatatgaccagttagagtctgatattaccacactggcatatctgggagaagatggtatgacctacctgctgcttaacggaaaggttacaggaattgacctgaacagcaatgagtcggttactgtagcgtatggcctgagccagggaagttttgcagtcagtgcagatggaagccgtatggcatggcaggaaggaaataatgcatatcagtcggaaatgcttcatgttatggattttaatacagcacagaaacaggatattacagctccatcaggagattatgtaagggctcttggttttgtaggaagtgatctgatctatggtttcggacatgaaagtgatctgtggtcagtaaatggaattgtaaaagaacttcctatgtacgccttgtatattgctgataatgagatgaacattcagagcgaatataaaaagccgggtatctatatatcagatgtaacggcagaagatggaagaatccatttaaaacgactggtgaaaataggagatgggcagtatgcttaccaggatgaggacaccattgtttgtaatgaaaaagtagataaggatccttttgaaggacttggatggtatgcgtcccaggacaaaggcagggtctattttgtacagacagatggagaaataaaggcttcttctgtgaaaacagaggtaccaaaggcattttcttatgaaaatacaagtacgttggagttgtctggcagacagaataatcttgaggatacggatcttattttctatgcttatggcggtggaagatacctgggagcctttaaaaatttcagtgaagcagtgaatacagcctatgaaaaaatgggctatgtaacagatcaaaatcagcatctgatctgggatcgtattaataagaagccgatccgcagcctgaaagatccggccggacaggcaagagagttattatcttatatggacagcttaggtgaaaataagctgagagatggcggacttatgacattagatgggtccggctgtaatgtaaatcaggtgttgtattttattgataagggaataccggtggtggcatgcagaccggatggttcctatctgcttttatatggatacgaccagtacaatgtaaatatttatgatccggcaacacaggagatctccaagatgggactgggagatggggctgtctatttttcaggagcaaataacagctttttgtgcggtctgaaagtggaataaaaaagcacacactttacaaattccattcttatggtataatctaatggatgtaaataaattgtgaacgaagttttagggaattcttaagtcccattagaagaatttgctgtaaggattgaataagatgtactctcgaaatcttcttgcaaaataaagcacaaaaagattttgggagtacattaagcaacagaggtgtgtaatggaacaatatattataaaaggcggtaatccgttagtgggtgatgtaaccatcagcggtgccaagaatgctgcgttaggtattcttgccgcctcgatcatgacggatgatgatgtactgatcgataaccttccagatgtaagagatatcaatgtaatgctggaagctatccaggagatcggtgcaagagtagatcgtattgaccgtcatacagtaaaaatcaacggcagcggtattaaagaagtgtccgttgatgatgaatatatccgccgtatccgcgcatcttattattttatcggcgccttgctgggaaaatataagagcgctcaggtaccgcttccaggcggatgcaacattggaagccgtcccatcgaccagcatattaaaggtttccgcgcgctgggagcggatgtacagattgaatgcggcgcagtgatcgcccatgccattgatctggtagcaagccatatctatctggatgtggtttctgtaggtgcgactatcaacattatgatggcagcagctatggcagaaggccagactattctggagaatgcggcaaaagagcctcatatcgtagacgtagccaacttcttaaacagtatgggagccaatattaaaggtgctggtacagatactatccgtatccgtggcgtaggcaagcttcatggaaccgagtattctattatcccggatcagatcgaagcaggtacttttatgtgtgctgcagcagcaaccagaggggatatcatggtgaaaaatgtgatcccgaagcatctggaagctatttctgccaagctcattgagatcggctgtgaagtgattgaatttgatgatgcagtccgtgtggtaggaaaaccggtacagagacatacagacatcaagactctgccttatcctggatttccgacggatatgcagcctcagatggctgttacacttgcgcttgcaaatggaaccagtatggtaacggagagtatttttgagaaccgtttcaaatacgtggacgagctggcacgtatgggaagccatattaaggtagaaggcaatgtagctgtcattgatggcgttgcaggctttacaggtgctcaggtaaatgctccagaccttcgtgcaggtgctgccttagtgatcgcaggactggctgctgaaggctataccacagtagatgagattggctatatccagagaggttatgagtgctttgaagaaaagcttcaggctcttggagctgtgatcgaaaaggtggattctgagcgcgaagtgcagaaatttaagttgcgtgtaggctgattgagaaaaatagatattgacatacctgcgcaaatccattaagatatgtgaggtaatccgtttagatttacaattaaaaagttcgtatatatcccttattcagagtgatggaggtacaaaggacctgcgaagtcacggcaaccccggttgagtatgtgaaagcaagatgcacatgcgaaagggccggaaggtgccagcctgagcgaggagcagacgagtacggaaattccggaaaactgcttgatcgagcaataagaggatttgaagatctgctattttcaagtccgcaattgctgcggacttttttcttgccattgcatatgggagcgcgccagaggtcgttcgctgttcacgaaatgcagtgcccgctttagcgggtaacgggtcaacaaagcaaactaagataacaatataacaaaaacgaaaaaggagaacaaatggaaagaagattatttacttccgaatctgtaactgaaggccatccagacaaaatgtgcgatgccatttccgatgctattcttgatgcattaatggaacaggatccaatgagccgtgttgcatgtgaaacagctaccactacaggacttgtaatggtaatgggtgagatcactaccaaggcttatgtagatatccagaagatcgttcgtgagactatccgtgagatcggatatgatcgtgcaaaatatggttttgactgcgatacctgcggtgttttaactgcaattgatgagcagtctgctgatattgctcttggcgttgacaaggcattagaggcaaagcaggctggtgaaaagcacatgactgaggaagagttagacgcgatcggtgctggtgaccagggtatgatgttcggttttgcaagcaatgagacagaagaatatatgccttatcctatttctatggctcacaagctggcaagacgccttacagaagtaagaaagaacggtaccttaaagtaccttcgtccagatggaaagacccaggttactgtagaatatgatgagaatgacaagccagtacgtctggatgcagttgttctttctacccagcatgatgagaatgtatcccaggagcagatccatgaggatattaagaagtatgtatttgacgagatcatcccggctgatatggtagacgagaataccaagttctttatcaacccaaccggccgtttcgttattggcggacctcacggagacagtggtctgaccggccgtaagatcatcgtagacacctacggcggttacgctcgtcacggcggcggcgcattctccggaaaggactgcaccaaggtagaccgttccgcagcatacgcagcacgttacgttgcaaagaatatcgtagcagcaggacttgctgacaagtgcgagatccagctgtcttatgccatcggtgttgctcatccaacttccatcatggtagataccttcggaacgggaaaggtaagcaacgagaagttagttgagatcatccgtgaaaacttcgacctgcgtccagctggcatcatcaagatgcttgatctgcgccgcccgatctacaagcagaccgctgcttatggtcactttggccgtcatgatgtagatcttccgtgggagaagttagacagagtagaagatctgaagaaatatctgtaggaaaatgttctgttatttgtgataaaacaggacagaaatgcagattgtgttaaaataaaaacaataaataaccggataaaagaaggttaaaacagagaaacgtctggacaaaaacaggaaatgcattatgcaatcccttgttccaggcgtttttttgttgccatgcatctggaagaagctgccagtggcaggttctgtaagtattgtatcaaaggatattcgcaatccgctttcgctacctgctcataataaaaaagctgctctgcagcttatcaggcgggttttcacccacctgatacaagcaagttcctattcatttatggatgatctcgtaaaaatgaggaaggaacttccttgtttttattaaaaaacatagttgacatttttttaacaatacgatataatgcctaatgtgagattgataattaattaacgaaagaaataaagcaatcgacacaacataacatgaaaacaaacacattaaaacgataacaaacacaaggcattacaaagtaacacaaacacaaagggaattatggaggaaatggaaatggcaaagaaagcagaacaggttgttccggagatcattgacagcgtagaaggcttaaatgcaaaaatggcagcaatgcgtgaagctcagaaagtatttgcaacctacacacaggagcaggttgataagatcttcttcgcagcagcaagcgcagcaaacaagatgcgtatcccgctggcaaaaatggcagtagaagagaccggaatgggtatcgtagaagataaggtcatcaaaaacaactacgcagcagagtacatttacaatgcatacaagaacactaaaacagttggtgtgatcgaagaagataaggaatatggaattaagaagatcgcagagccgatcggtctggttgcagcagttatcccaactaccaatccaacatcaactgcgatttttaagacattgatctccttaaagaccagaaatgcgatcatcatttccccacatccaagagctaaaaagagcaccattgcagcagcaaaggtagttctggatgcagcagttgcagctggagcaccagaaggcatcatcggctggatcgatgttccatctcttgacttaacaaacgaagttatgagagatgcagacattatcctggcaaccggtggtcctggaatggttaaagcagcttattcttccggaaaacctgcacttggcgtaggtgccggaaatacaccggttatcattgatgacactgcagatgtacgtatggcagttaactccattatccattctaagacctttgataatggtatgatctgtgcttctgaacagtctgtaaccattctggagcctgtatatgaagctgccaagaaagaatttgaatacagaggttgctatttcttaaaaccaggtgagatcgaaaaggtaagaaagaccatcctgatcaacggtgccttaaatgcaaagatcgttggacagtctgcatacaccattgcaaagctggctggtgtagaagttcctgtagataccaagatccttatcggcgaagttgagtccgtagatatcagcgaagagttcgcacatgagaaactgtccccagtacttgcaatgtacaaggcaaagacctttgacgaggcactggataaggcagagcgtctggtagctgacggcggttacggccatacttcttctctgtacatcaatgtaaatgaaactgagaagatcatgaagcatgcagagcgcatgaagacctgccgtatcctgatcaatacaccttcttcccacggcggtatcggtgacttatacaacttcaagctgacaccatccctgacattaggctgcggttcctggggcggaaactccgtatctgagaacgttggtgtaaagcacctgttaaatatcaagactgttgctgagaggagagagaacatgctgtggttcagagcacctgagaaggtttactttaagaagggctgtctgcctgtagcactgaaggaattaaaggacgttatgggcaagaagagagccttcatcgtaacagactctttcctgtacaagaatggatatacacatgttatcactgaccgtttaaatgaaatgggaattacttacactgtattctctgatgtacagccagacccaaccctggcaaatgcacaggctggcgcaaagctgatgagagaatttgagccggatgtgatcatcgcaatgggcggcggttccgcaatggatgccggcaagatcatgtgggttctctatgagcatccagaagcagacttcatggatatggcaatgcgtttcattgatatccgtaagcgtgtatataccttcccaaccatgggcgagaaggcatactttgtagcagttcctacctcttccggtactggttctgaggttacaccattcgcagttatcactgatcagaacaccggtgttaagtatccgttagctgactatcagctgctgcctaagatggcaattgtagatactgacaatatgatgagccagcctaagggactgaccagcgcatccggtctggacgttctggtacacgctctggaagcatatgcttctgttatggctacagactatacagacggtcttgcattaaaggctatgaagaatgtatttgaatatcttccaactgcttacaatgagcctggaaatgtagaagcacgtcagaagatggcagacgcttcctgcatggctggtatggcatttgcaaatgcattcttaggtgtttgccactctatggcacataaattaggtgcattccatcacctgccacatggacttgcaaatgcactgttattaaacctggtaattgagtttaacgctgctgagaacccacgcaagatgggaaccttctcccagtatcagtatccacatacccaggcaagatacgcagagtgcgctcgtttcgtaggcatccaggcgaaggatgatgctgaggcagttaagaagctgatggagaagatcgaagacctgaagaagcaggttggtgttaagtcctctatccaggcatacggaattgatgagaaagatttcttagacagactggatgacatggtagagcaggcattcgatgaccagtgcaccggtgctaacccaagatatcctctgatgagcgagatcaaggaaatgtacttaagagcttactacggaaaataatcattaaatataaatcgaacccattgtgggtaaaacctttatcctttgtgtttggagcagaccgtcggcctttcggggcaggcggtctgttcgcgtttgggagtttatgagaaattgtgtttgtgagtattggggactggatcatacaaacgaaatctggtgttttccggaaaaatcagctatactgttggtaaaaaacaagaagggtaagaaatgtttcacgtgaaacattctgcgaaaggggattacagatggaaatagatttaaaggaaacgatggaaatggaagatcaggaaacaggctatggggaactgcatcttcatttagacggtgccattacaccccggatcgccaaaaagctggcggcacttcaggggatagaactgccatatgagggagagcagttaaacaatgcattgtctgtaggggaagactgccagagcttaaatgaatttttgcagtgttttgatctgccgttgaaacttttgcagacaaaggaaggtattagtgaggcgatatatctggtacaggaagagttaaaggcagaaggcctttcctacgcagaactgcgttttgcacctcagctgcactgtcagggtggattatctcaggcacaggtcatagaagcggctctggacggtcttaaacgctccacactgccatgtaatctgatcctttgctgtatgcgtggcaatggaaatgaaagggcaaacgaagaaaccatggagctgaccggggagtatgtaaagaagcgtattctggcagacggaaggaaaggttatggtgtggcagccatggacttagcgggagcagaggctctttatcctacttataaatataaagagctgtttaagaaggctgctgacaggaacattccatttaccatccatgcaggtgaggccggcggagcagcagaggtagcctgtgccattgaaatgggtgcagcaaggatcggacatggagtgagaagctatgaggatccggctgttgtgcgcatgatccgtgaaaagggcattttcttggaaatgtgtccaaccagcaaccggattaccaaggcgatcccggatatgaaagtttatcctttaagagaatatttaagccaggggatcagggtagctgtgtgcaccgatgatatggccatttgccgtacagagcttaaggaggagtttgaatatcttaagaaactggttgggctgacagaagaagaaaaagtgcagattcttaagaatacaaaggagggtgcttttttataacttggagttatatatttaataagcattttcgtataggtttaatatgtaattgtttcttgactttagcaaattaacttgctatacttttcctaaagtgcctgcttaataaagcaagtatcccctgggaagccggtccccccatagagccgatattccaaaaaaatttaataaaaaccaaggagggtattcaaatgtcttacgttgatgaaatttacgagagagtagttgcacagaatccaggtgaacctgaattccaccaggccgtaaaagaggttctggattctttaagactggttattgatgcaaatgaggagaagtaccgcaaagctggtatcctggagcgtttcactgagccagaacgtattgtttctttccgcgtaccgtgggtagatgacaatggaaaggttcaggtaaacaagggttaccgtgtacagttcaacagtgcaatcggaccgtacaagggcggacttcgtttccatccatctgtaaaccagggcatcttaaagttcttaggtttcgagcagactttgaagaactctctgactggtcttcctatgggcggtggcaaaggcggttccaactttgatcctaagggcaaatctgaccgcgaagttatggcattctgccagagctttatgacagagctgtaccgtcacattggaaaggatacagacgttccagcaggtgatattggtgtaggcggcagagagatcggctacctgtttggccagtacaagagaatgactggtttatatgaaggcgttttaactggtaagggcttaaccttcggtggttctttagcaagaacccaggcaacaggatatggccttgtatacatgttagacgagatgttaaagcacaacggcaaggagatcgcaggaaagactgttctggtttccggttccggtaatgttgctatctacgcagttgagaaggctcagcagtatggtgcaaaggttgtagcaatgagcgattccaacggctatatctacgatgcagacggcatcaagttagatgttgttaaggagatcaaggaagtacgcagaggacgtatcaaagagtacgcagatgctgttcctaccgctgtttatacagaaggcaagggcatctggaccattccttgcgatatcgcacttccatgcgcaacccagaacgagctgaacttagatgatgctaaggctcttttagcaaatggctgcttcgcagttgctgaaggtgctaacatgccttccacaagagaagctactgacctgttcgttgagaagaagatcttgttcatgcctggtaaggcagctaacgctggtggcgttgctacttccggtctggagcagagccagaactccttaagactgtcctggacctttgaagaagttgatgagagactgcacaagatcatgatcgacatcttcgcaaaggcagcagatgcagctgaaagatacggagtacctggaaactatgtagcaggtgcaaatattgccggatttgagaaggtagtagaagctatgatcgctcagggtattgtctaaaaaataaagtaatttaaaattccagatcctgcacatggctataaacagtctgtgtgcaggatctttttgttatcatgcatatgttttcggaaaggttttactatggagatcagtttacttttgatgcagcagatcgcagaattgtttttaatgatatttatgggctatgtgatcgtaaaggcagggcttttgaagggagaggacagcaaggttatttcaaagatcgtgctgtatctgatcattccctgcgttatcatcaatgcgttccaggtggattataccagtgagaaggtacagggccttttactggccttcgcagcctctgtaatgcttcaggtgctattacttatcattgtatggggcgcaggtcgtttaatgggcttaaatgaggttgaaaaggcatctgtgtattattccaatgcaggaaatctgatcatgcccatcgtgacctttgtcctggggcaggaatgggtactgtatggctgcgtgtttatgagtgtgcagatcgtgtttgtgtggagtcatggaaaatgggtcttaagcaggcagagtaagatcgactggaaaaagatattgttaaatattaatatggtcgctgtatttgcaggcgtgttcctgtttttcacaaagatccgtttgccccagatcttaaaccagacttttggctctgtgggaagcatgatcggaccggccagcatgatggtaacgggaatgctgatcgcagagatgagcctgaaagatatttttacaaatggaagagtttattttattacatttttaaggctgatcgcagtaccggcggtggcgttgctccttttaaaggtcagtggtcttgtaaatggaagtcctgacggaaagaaattgctgctgatcgtatttctggcagtgatcacaccctctgcttcaacgatcacccagatgtgccaggtatatggaaacgactcccaatatgccagcgccatcaatgttatgactacattgttttctattgtgacgatgccgcttatggtgcttttgttccagatgatactttaacaaaacgaaaagaccaggtactggggatacctggtcttttctgtatacatatgtgtataaaggggggataaaatgtttgtgtgaaagggggagggccctttcggttttctcttgtttacgttgcctattatatatccgatacattgtaaaaaccattgtaatgtgcgtaaagaatattgcaaatcgcacaaactttgatacaatggatactaggggcaaaaggctggaaatccggtgcaagcctgtttgcaggaggatttttgaacctgggacccggtatcatgcaataaaaagagggagatcatgtatcaggaagacagttttaaaacaagtcaggtggtgtatgcccatacccgcagtgatgaggcggatatggagtataagatgcactgccacaacagttatgagatctattacatggtaaaagggaacgtggagtactttctggaggggacttcttatgtaccaaagcctggaagtctcctgatcattccgccaaactgctttcatgggctgcgggtgctggacggaagcgagtaccacaggatccggctgcactttgtgccggaacttctgacggaaaaggaaaaacagctgcttttgggaattcttggaaaaagctgggggtatatggaagaacagttccgggcagaatggtattttaattccctggaagaatgtggatcttatagcagggaactgcaggatattgcaattcgcgcacggatcgtatcgtttttgacctatctatctgcaatgtatgaaaagggggtaggtcgcggaccggggaaggaagatgtagcccaggagatcctgcgttacattaatgagcacctgacggagcatctcacattagaaggactggcagaaaaattttatatgagtaaaaatcatctgactgctatctttaagcgtgcggcaggcactacggtagccagatacattttatataaaaggatgacgattgcaagaaaagaactggccgggggaacaccggctgcagaggcagcacttaaagccggatttggagattattccagcttcttccgggcgtaccggaagatgtttggctgtgcgccttcagaccaacaggcaatggaactgccggatatggataagagcggggacttttagaaaaatctaagataaattctttatacaatctttatacgaagcgttgtatttttaatagaaactttgaggggattatgtcataatgaaatgacattgctggtaaaagggctgttacaggagggaaaatggaattatttcaaaaaaagaagagcttatcttcttttcagatcattatatttggctttttggcagttatattagtgggaacactgcttttaatgctgccttttgcatccagggagccgggaagcgcgccatttctggatgcgttatttacagctacatcggctacctgtgtgacagggctgatcgtccatgatacagctacgtactggagctgttttggacaggtggtgatcctgctgctgatccagatcggaggaatgggcgttgtgaccattaccattgcagtagccatggtttcagggaagaagatcggtctgatgcagagaagcctgatgcaggagtcgatctcagcaccacaggtaggcggcattgtccgttttacaggctttttcctgaaaggtatcgcgctgatcgaactgctaggagctattttgctggcacctgtgtttataaaggactttggagtgggaaaagggatctggtatggtgtttttcattccatttctgctttctgcaacgcaggctttgatctgatgggagtcagacagcagtactcgtcactgacttattatgctggaaacgggcttgtaaatgcagttattgtattgctcatactgatcggcggtctgggatttctcacctgggaagatataaagacaaataagctgcagtttaaaaaatacaggatgcagagcaaggtaatactggtaacagatctgatactggtgatcgtacctacggttattttctattttggggagtttcacggatcccagtggggaaatggactggaacggttctggttatccctgtttcaggcggtaacaccaagaactgccgggtttaatacagcagatttcgggcagatgagcgaaggcggactgtttttaatggtcatgttaatgctgatcggcggtgcgccgggatctaccgcaggcggtatgaaaatgactaccattgcagttttactgctttcaacggcggctgtatttcgcagaaaagaagacgcccagtgttttggcagacgtattccaacggaaaccgtgcggtatgcggcagtagttatgctgatgtatatggtgctttgtacagtgggcggactgtttttatgctatgcagaaggactgcctgtgctcacaagtttgtttgaggccggttctgctattgcaaccgtaggtttgacactgggtgtgacaccgaccctgggagcggctgcaagactggtattgattgttttaatgtactgtggacgcgtaggcggcctgacgctggtatttgcagcactgtccggtatgcggccgagtatgacaaaattcccccaggagaagatcacagtgggataatatgggaatattaatataccgccgcgtatgcggcgggtatcggatatgtgcaatggaaaaataaggaggaaaatcatattgaaatcaatattattaataggacttggacgatttggaagacatattgcggagaaattaaacgaattaaatcatcaggtattagcggtagacaaacaggaggaccgtgtagaggcagtgcttccttttgtcaccagcggacagatcggggacagcaccaatattgaatttttacagtctttgggaattggaaattttgatgtgtgcatcgtggcgatcggtggggatttccaaagctctttggaaacaacggcctatttaaaggatctgggtgcaaagctggtagtttcaagggccgcaagggatgttcaggcaagatttctgctgcgcaatggcgcagatgaggtcgtgtatccggagaaacagctggcaaactggacagcgatccgttatagctcggagcatatttttgattatatccagttatctgatgaccatgcgatctttgagatcagcattccggaaaactgggtgggaaagactgttggaaatattgacatcagaaagaaatacaacatcactatcatggctttaaaacgcgatggcaagctggaaatgtccattactccggatacagtactggacaaagatgttactatgctggtgctgggagcaagcagggatatccagaagtgttttcatatttaacataatactgcaatctggtcatttgcaggccttgtggatcctaagaagatttcagaagagcatcagaaaacctggggaaaagaaaaatggaagaacggatacttgtatgtttatcatcttcaccgtctaatggaaagatcatacgcacagctgcccagatggcagaggcttttaatgggacattaaccgcattatttgtagaaacacctttggccggaaaaatgggaaaagaggaccaggagcgcctgaaagggaatattaagctggcaaaacaatctggtgcagaaatagaaacagtttacggtgatgatatttcttttcagatcgcggagtttgccagactttcagggatcaccaggatcgtgatcgggcgcagcgctgcaaagaaaaaaggggtttttgcaggaacatctcttgtggaaaagctgatcgatcatgcgcctgaaatggagatctatatcatacctgacagccagatgggacctgaggtgatccgtaaatggaacaggctggcgcaaaagaatgcattttcctttaaggcagcagtcaaaagcgcaggcattttatttgcagcaacagcagtaggatggctgtttgaaaagctgaagctgacagatgccaatattattactgtttatattttaggagtgcttctgatctctatagtaacagaaggctggttttacagtttttcgtctaccatagccagtgttctgatttttaattttctgtttacggcaccacgttttacgcttcgggcttatgatcgcagttacccgtttacatttgccgtcatgtttcttgcggctttgatcacaggctctctggcctccaggctgaaacagcatgcaggacaggctgccagggatgcatacaggctgaaagtgctgcttgatacgaaccagcttttacagcaggccaaaggaaagacagagatcctggaaggggcggcacagcagatcgttaaacttttaaagagagaaacggtgatctatgatgtaaaggatggaaaactggagcatcctttgcgccgggttccccagggggaagaggatatcaccattgaagatgaagcctgtgaggaacaggcagctgcatgggctttagagaataaccgccatgccggaacaggaacagaccattttaagcaggcaaaaaggcagtatctggcgatccgcgtaaacagcactgtttatggagtggtggggattatgatccagaaacagccgttagatgcctttgaaaacagtgtattattgtccatattgggagaatgtgcccttgcactggagaatgataaaaacgtgcgggaaaaagaagaggcagcgatcctggcaaagaatgaacagttaagagcgaatttgttaagaacgatctctcatgatctgagaacgcctcttacatctatttcaggtaatgcaaataatctcctttacaatgaaagctgtctggatgcacagatgcgccggcagatctatggggatatttatgatgattccatgtggctgatcgatctggtggaaaacctgctttccgtgacccggatcgaggaaggcaggatgcagatccgccagtcagcagagctggtggatgaggtgatcaaagaggcattaaagcatacgggacagagccggacaggaaggaccataaaggtagaagaggaagatgaactgatccttgcaaagatggacgcaaggctgatcgtccaggtgctgatcaatctgattggcaatgcggtaaaatatacgcctcagggaacagatattacggtcagggtgaagaaagaaaaagcagaaaacgctgaaagatcccaggtcatcatttctgtatgcgatctggggaacgggatccctgatgacaggaaagaaagagtatttgacatgttttatacaggcagcgaccaggtggcagacagccgcaggagtttaggattggggcttgggctttgcagatctattattaatgcccatggaggaaaaatatggatatctgataatatccctcatggggcggtagttacgtttacattacctgcagaggaggtggcattaaatgaataaacctttgatattggttgtggaggatgatattcctgtaagaaatctgatcactattacattaaagacccatggatacaggtatctgactgccgggaccggggatggagcagttgtagaagcttcttcccacaatccggatgtggtccttttggatctgggactgccggatatggacggcgtagatgtgatccggaaaatacgtacctggtccaacttgccaatcattgtgatcagtgcaagaagcgaagatacagataaaatagacgcactggacgcaggtgctgatgattatctcacaaagcctttttctgtagaagagttgctggcgcggctgcgtgttgtggaacggagaatggcgctcatgaacggcgaagcccagacagcagagtctgtttatacaaatggcagactgcggatcgattttgcagcgggctgtgcctatatgggggataaggagctgcatcttacgtctacagagtataaactgctgtgcctcatggctaaaaatacaggtaaagtgctgacgcatacttatatcacccagaaagtgtgggggagcagctgggaaaatgatattgcttctttacgtgtatttatggcaactttgcgtaaaaaactggaaagcgaaccggatgcccctcagtatatacagacccatatagggatcgggtaccgcatgatcaaagtagagtgatcatttattcagggttttaaagtaatgctccagcttatcgatgcccaaataaccaagagtgaacagaataaaaatgatcgcaaatgcaaaaagtgttaacataaaaacccctcccatataaatgaaattatataaatgatgtcctcagtgaatgtaaggtataagacctttgtttattgaggatatttttattataagggaaaagggataaagaaagggaaaggatgtaagcacaggtataaagaacacataaaagcataaatgattgttttttctcaataggagaaaagccgattgttccataaaatgggctgtgttatgattatccccggcgtttttgcaaaatggcagatgtcagaaagcaaagcggaaatgaaatgacagaagtaaacaaaatgacaaaagaaaacggaggggaaagagatgcggtcattgctgaatgtgccggcggaagtggtgtcggccaatattaatgcggctgttgcaaaagcagcagcaaagaaaaggcgtatttttgtcctggggatcatggcgggtgcctttattgcaatgggagcccagtcaagcagtctggcagtccataatattacggatgtgggaattgcaaggacccttgcaggatgtattttcccagtgggacttatgatgatcgtgtttgtaggcggagaactgtttacaggggactgtatgatgtccatggcatgtatgaaaggccgtattggctttggaagccttttaaggacccttttgatcgtttatctggggaattttgcaggagcggtgctgatcgcctttctggtggctcacagcggccagtatgattattctgccggggctttaggagcttataccattaaaacggcagtgggaaagactggcttaagttttatgcgggcgctgttttccggcattttatgcaatatcctggtgtgcgcagctgtgttaatggcagcggcagcaaaagatattggcggaaaagtgctggcgatcttcttcccgatcctggcctttgtagtatctggctttgagcactgtgttgcaaatatgtattatattccggcaggcatttttgcagcaggaaacccggcatatgtgcagaaagcccaggaattatatgggctgggagcagaaaaactgacaggacttaactggggcagttttgtgactgttaatctgctgccggttactattggaaatatcattgacggcgctgttatggttggcggcgtgtgcttttatctgcatgggaaggcagagggataataaatggaaaatctcctttactggcgggaagatcgctggtaaaggagattttttagtataaagagatctgggagaaaattgcggagaatagacggaaatgttatactatagaataataaaaatccggttaggagggagcaaaagtgaagaaggagtcctttgtaaataagatcagcatttatattggagtgacgttggttcttcttatatggctgctgactgcttacactgtgagcagctttcttctcttaaaagaaagtgaggagtcatcggtatggtctacgatccagatctacatgaaacagatcgacagtaaatttattgctatggatcagtgtgtggagggaatcgccggtaatcaggatctgatcggtcagatatgttacggaagtccggctgaccggtattatgcggctgtggagcttcaaaagagcatgaaaagagatgtgatcagcaatgcggagctggattacgttctgatcgcagagtccttaaataaaaacctgatcgcggcgtccactccgggagtttcttatggggagaaagaggcaattgcctcttatatctggaatctcatggaaaaggaagaccggggaaggccgcaatggtattatacaaagatcggtactcatgcctatattgcgaaaatatacaggggaagcaactggagtgtggcggcattttcaaaggaaaatacttttctttccgatatccgggcaaaagaatatccagacggtcagagttttcttcttacggacgcaaatggtgtatgcgtggaaaatctggaagaaggaaacagcatgtatctgggagagactttggaaatagaagattcctggaagaatgatcataaaaagcggatgatctctcttaaaagtgatcgtgcaggactttatattacaggaatgatcggcagtaatcattttctgggaaaattcagtacaaatagtattctgatccttttgatcatggttctggctattggctgtgatatgatccttttacattatattcaccgtgagatccacaggcccctggatcatctgatgcagacgatccaggagattgaagacggagattacaagcagagggcagaggaagattatcatacggaagaacttcagcgtcttacacaggcatttaaccgtatgatgaatgtgatcgttaatcttcggatcagggcctatgatgaaaagatccagttaatggatacgcagatgaaatattttcagatgcagttaaaaccccatttctttttaaatgccctgacaacgatctacagtatgagttatcagaagcggaatgaggatatacggacatatattgacgcattaacaaaaacggtccgttatatgtttaaaggcggtcttcgtctggtccttcttaaggaagaaacccagcatctggaaaattattttgaaatgcagcagctccggtatccggactgtgtattctggtattttgatatggaagaagctgcaatgtcgtggaagatcccccagatgctgttacatacatttgtggaaaatgaatacaaatatgcagtaaaaattgacagcgtcctttcgatactgatacaggcaaaagtccttttaaaagagggggaagaaatgctttatattcgtatggaggatgacggcgtaggttttcctgaacaggttatgcagtatatgaattttgagagcgaagatccttcgagggagggacatcatgtagggctgtggaatataaaaaggaccatggaagttttgtatcagaaaaaggaattgatccacctgtcaaatctggaaacaggggggtgtctgatcgagatatggatcccaaaaacaacagcagtgggtgaggaacaggagataaagaatgaacgtattgatcgtggatgatgacatggcaacagtagatgtgatctgtaaatccgtaaactggagcgctttgcacattgataaggtcatgaccgcttataacattgaaaaggcaaaggagatattagcagatacacctgcggatattgtggtttgtgacattgaaatgcctatgggaaatggaacagaactgcttaagtgggttcgggaaaatgatatgtcttcggaatttctgtttcttacctgccatacagaatttcaatatgcgtctgtggcaatccgctatcaagcagctggttatctggtaaaaccatttcgtgtagagcaggtagaagcagagcttttgcgcctggtccagaggatcatggagaagcggaaaatagaagaagaaagtcattatggaaaatggatgagaaacaatcgggggcagctgatgaataatttttggcgtgctttgatagagcgggaattaagggcagagatggagtttattgaccgtgagataaaaaaacgtcgtcttcctgtttttgcagatcagccggtacgcctgattggaataagagttgccagagaggaacaggctaaagaaacactgggggaaaacctgttggaatttactctggaaaaaatggtttcagagattgtagatgagtctgttgaaaatacgtcggttataaaaaagatcgtaaatgaggcgttgttctttctggtgatcgactggaaacggacactggaagaagtactcatggaaagatgccatatgctgataaaaacgggacaggattatgtgggctgctgctttacctgttgtattggaactccatgcagcatggaacagcttcctgataaagcagatgaggtggtcaatctgttgctgcgaaatgtcttggagtctgaccaggtatttcgtgaaggagaagcggcagttacatcggggttcaatacaaggcttcttgatctgaagcaaatggaaaatgatctgcgaaacaaggaccggatgaagatcttaaatacggtaaaaaccgttttgggaaagctttcccgtgaaaagagcgtatcggtagaaacgttactggtcatacagcaggagatcctgcagctgatctataccaatctttatcaaaatgggatccaggctgcggagttattcggggatgaagtctcccggaaaatccagcggcagtcggtccgctctgtgtttgacatgataaaatgggtgaattacgcaatatcacgtactttggagtacgaagatgagatcaaccggtccctttctctggcagataagatcgaaagctatgtgaaagaacattataaagaggatatttccagagataccattgcagatgtgttctttctgactccggaatatcttgccaaggtctataaaaggcagacaggacataatttaaaggattatatcatcggttatcgcattgaaatggcaaagcagcttctggctgatgatataaagagcatcagtgatatttcagcagaagtgggttttgacaatttttcttatttttctactgtatttaaaaagtataccgggatcacaccgggagaataccgcagatcaaaaaaatcttaaaatcaaaaaaatatcacttattttttaaagaaatgtatcatggacctcctttataataaagcccagaaaggcaaaataaaggaggttacttgatatgaaaaaaagtatgaaaaacagagttgcaggcgcggcggccgttcttcttgccggttcaatggcattttccatgactggatgcggcagcagttcggataatacagccggtcagcagactgccacagatcagaaaacggaaggaaatgaagaatatacaaagatcgtatatgcctttaaatcatttaacaatattcctgaagatctgtccgacgtaaatgaagcgatcagtgagatcacaagagagaagatcggtgtggaagtagaattaatgccgattgcttcttctgcatatggccagcaggtaagtcttgcaatgcagggcggggaacagctggacctgttccatacaggaagcggtctggagttatctacctgccttgccaatcatcagctttatgacattacagatattgtaaaggaacatgctgccggcgccattgacgcggtaggtgaggactttatgaaaacagaagtagtagacggaaaggtttatggtattccggctgataagggtgttgctcttgcgccgacacttctgtacagagaagatatcatggaagagatcggcgtagatccggcagacattaaaaatattaatgatctgactgatgtatacgcaaaggtaaaagaggcttatcctgatatgatcccgctggtaccggtcaatccaggtgattcaggtatgatcaataccatttatggatttgattatctgggagaccgctatttatctccaactggaattttaaatggcgatgatatgcaggttgagaatttctatgaaacagatggatttaaggatatcctgacactggcaagagactggtataacaaaggctatatcatgggtgacgcagcaacgactaccagtacatccattgagctgttaagcgcaggaaaaggattttcttacatctccaactatggtggaaatgacgccgcaacccagatctccactcagacaggccagaaaataggggctcttcgtttgagccagccgtatcttggaacttctgatgtaaacagagtatcatgggcagttgcatctacctgtaaaaacccggaaaaggcattggaattcctgaatttaacttatacagataaagatgttatcaacctgattatttacggaattgaaggaaaagattatgtaaaggtcagcgacaatgtagtgaaatacccggacggtcaggacgcaagcactgttccatatacagcccagcttagctgcggcgtatgcggaagccagtttaaccagtatatcctggaaggtgccagcgaagatacacagaaagttatgaaagaggataatcggaatgctggaagatcaaaggcatttggatttacctttgacagttcaactgtgaaaacacagtatacagcagtaaataacgtgatcaatcagtatcttccaggactgcgctgcggaagccttgatccggaaactgaacttccaaagttccagcagagtttaaaggatgccggaattgatgagatcattgcggaaaagcagaaacagctggatgcatgggctgcagaaaacgcgaactaggtgagctattatgacagggagaaaaagaaaggggcgggggacaaaaaacgtccccctgctattgatcgcattgccaggccttgcttatcttctgataaacaattatatcccaatgttcgggatcttcctggcttttaaaagttatgatttttcaaagggagtatttgggagcccctggtgcgggttcgataattttaagtttctgtttaagacaaaagacgcgctgatcatgacaagaaatacgatcttatataatttcgcttttattgtgattggtacagctcttggtatttttgtggcgatcctgctgacagagatcgtaaaaagcgtctgggcaaagttttatcagtcagcgctgcttttaccatacctgctttcctgggtggtgatctcctacatggtttttgcgtttttaaattcagatagtggatttatcaacaatactgtgttgaaagtgttgggaatggctccggtatcctggtatacaaaaagtaatatctggccgtttatcctgattctggtatttttatggcagacagtgggccatacgtcgatcatttacatggccagcattgcaggtattgataaaggtatttatgaagctgccaagatcgacggggcaggtaagatcaagcagatcttttacatcacactgccactcttaaggccaacgatcacgatcatggttcttatggcgatcggaaagatattcttttctgattttggactgttttatcaggtacctatgaattcaggcgctctttatggtgtaacccagaccattgatacctttgtatacagaggattaatggaattaaatgatgtgggaatgtcatcagcagcaggattgttccagtcatgtgttggatttgtcctggttatcactgctaatgcactggtccgtaagatgaaccctgaaaatgcgctgttttaatggaaggaggcaataaaatgaaaacgagattaggcggggaacgcagctttcgccgttttgctctgataacattaggtatcatgaccattttatcattgcttccggttattctgatcgttattgcgtcatttacagatgaaaacagtctgatcgcaaatggatattcttattttcctgcaaaatggagcctggatgcgtatttttatatggtaaagcaggtaaaactgatcacaagggcttatgggatctccttttttgtaacaatcactggaacgctcttaagtgtgctttttactaccacactggcatatcctatgtccagaaaggattttaaattttcaaagattcttacatttctggtgttctttaccatgctgtttaatggcggcgttgttccgtcctacatgatgtggtctcagttttttcatttgaagaacacgatctgggcgctgatcctgccaaattatctgatcacagcttttaacattatgctggttaagaattattatcagaacagtattccagatgccttgatcgaagctgcagaaattgacggagcttcggaacttacgatcttctggaagatcgtctttccattatctacgcccgtgatcgctacgatcagtctttttacagcgctgaaatactggaatgactgggtaaatgctctgtattacattacaaaaccgcaactttacggaattcagaacctgctgcttcgcattatggataatatccagttcttaaaatcaggaggagccggtgaaattgcaggcgcggctatggtagatcttccaggcacctctgtgcgtatggcaatggcagttgtgggaattttgccaatcattttaatttatccatttgtacagaaatattttatcaaaggtgtagttgtaggcgcagtaaaaggctaaaaaagattggcgactatttgcaacgtttatagtttgggagaaaaatgatgacagggaagaaatttgagagaactactccggaagcagtgggaatttccagtaagagcctggaacgtctgattgaaaatctggagcaggtaacagagatgcatggcattgtggtcatgcgccatgaaaaaatatgtgcagagggctggtgggcgccttatgcgccgggaatccgacacagtctccattctttgagcaaaacctattctgctactgcagtaggaattgcagtaacggaaggaaaagtttctttagatgagaagattctttctattttctcagagaaggcaccagagaatccagatgaatatctgaagcagctgacggtaaaggacatcctctgcatgggaagtggaatggaaaggcttcctgaggtgacagagaactggctgcaggcatatctggaagttcctattaagcatcgtccaggaactgcgtttcaatacaacagtgtggggtccactcttctttgcgccatcgtagagagaaaaacgggaattcccacagaggaatatttaaaaagcaggctgtttgataagattggcattgacagtgataattttttgtttgaacgcatgccagacggtacagtttttggcggcgggggattttatgccacaacagaggataatttaaggctgatgaagctttataaagacggcggagtctgggatggtgagcgtatcttatccgaagaatatgtgaaaatggcaatatcaaagcagatcgatactgccacagaaaaaaatggcaatccagaggctacagacaatttccttggctatggatttcaaatctgggtgtgccagccggaaaatgtataccgggctgacggggcaatgggccagttttccattgtatttccagatcaggatatgataatttccgtgaatgaaacggcttcgaatgctcattgggcgcagaacacattggatgaaatatggaagtttgccagggaagtccgggaagaaacactgccggaggatgaagctgcatctacgcatctgaaagagaagctgtctcatttatccctggaagcaccttgtcggcagtgcagtcgcaacagagaaaaagagtctgaaataaatggaaaatgctattttgtgtcagaagggcgtatgggctttgaaacagagatccagaattcccatgcaggattgaaaccacttgagggaataacagaatttaccatgagatttgtacctggaacctgcgaaatgaagttttgccagcagggaaaagaacatgaagttctgattgctacagatggatcatggagatggaaccggcttaaactagatggaagggtaaatagtgagctgtgtttaagtggatattgggaagataaaaactgttttgtagtccatgcaagatggatagaaacctgctatgaaaatgaactgaagttctgctttgaaaaagatcaggtgcatatgagtagaatgaataaagtaggacgatatatgacatcgcaaccgcttacagcgacggcgcagaaagcctgaaaataaaaaggacaaaaagaggtgatttcataaatgctgaataagatcatgctgatcacatatcctgattccatgggacatgatttaaaagatctgcatcatattttgaacctgtattttaaagatgcggtaaaaatggtgcatatcctgccgttttttccttccagtggggaccgtggttttgccccgttaggatatgaaaaggtatcagaagagttcggagactgggaagatatccgtatgctttccgaagaatatccattgatgtttgactatatgatcaatcatatctccgcacacagtccttattaccaggattttttagagaaaaaggatcagtcgccatacagaggattgtttatccgctataaggatttttgggaaaatggaatgccaacccaggcagaaacggatgctatttataagcggaagcccagagcaccttatgttatggcagagtttgggaatcagacccaggaggcagtctggtgtacttttggagaggaacagatcgaccttaacatggagacagaggaaggaaagcgctttttggaagaaaatcttcgctggctggccagacacggtgcatcgcttatccgcctggacgcttttgcttatgctgtgaaacgaccgggaacttcctgcttttttgtagaaccggacatctgggaacttcttggaagatgtgcgaaaattgcagctgaagaaggtgcccagatccttccggagatccatgaacatttttcaatccagcaaaaactggcatgccgggattattatgtgtatgactttgcgctgccaatgctgcttttacatgccatttattttaaaaacagtgaatatctgaagcactggtttgaaatatgtccgagaaagcagtttacaacgctggatacccatgacggaattggcgtagtagatgtccgggggcttttgccagacgaggagattgaagctgcgaaagagcatttgtttgagtatggcgctaatgtaaagcgtgtttacaatacggagaaatacaataatctggatatttatcagattaattgcacctattattcggctcttggggatgatgataatgcttatcttttagccagagcgatccagttctttgcgccaggtacgcctcaggtttattatgtgggactactggctggaaaaaatgatatttctcttttggaggagacgaaggaaggacgaaatatcaatcgtcattattatacggaagaagagataggacgggaagttgaacgcccggtagtaaagcaattgttggaacttatgaaactcagaaatacgcatcctgcatttgatggtgagttttatatgcttccatgtgagaaggagcaattgatccttgggtggaaaaacggagacagcaggattgagctgcatggagatctggggaagaaatcctttgaaattatttaaaaccaaaggagcagggctgatttatttgaatcagtcctgttcctttttaacgtgtttgaaattttaaactcctcacattttttcacactcttatcaaaaactcccgttatagtttaggtcaatgaaagataagtaaaaaaataggcaagagaaaatggaagagattaaaggagaaataaacaaaaggaaaaggatgtaagtgcagatataaagaacacataaaaatacataaaagaatgcatgaatgggcaaacgccagcgttgttttcttaacaggagaaaaagataagagaaaaataaaaaagctaaatgcccgtatatatttgatacgggttgaaaggagcaattctatgaaacttaagggtaaaataaaagaacttactgcacttacttctgcgatctgcatgctgtctgtaccgaatacaacggttttggctgctactggaacaaaaataaactctgttcctctttctattgagtcagaaatcgaggcttgggatacagatagcgatgtaaccgtttccacatcctcttctgaatttgatatagatgatgtggtgatcaccaatgagccaagcgacgagtgggatgatggcgacaaaccgaaattcaagatcactttatatgcagatgatgattattattttgcttccggattttcaaaaagcagtgttagcttaagcggttctgacggtacggttacatcagtcagcagaagctccagtgatactttggtcgtatatgtaacactggatgccctggatgatgatgatagtgatcatgatctggatgtaagcgggctggaatgggatgagtcagacgggacggcttcctgggaagaaagtgatgatgcaaaaaagtatgaagtacggctttaccggggaagcagcgcagtgaccagcgtgctgacgactaccagcaccagttatgatttttcaggctatataacaaaaagcggttactatacatttaaagtaagaggcgtgtacaacacttctaataagggaagctgggaagaatcggattcatggtatgtttcatccagcgaagcacaggagatcagttcttcaagcaaaagtactccttccaataataccgcctcttccggaactggcgcgtggttaaaagatgatgcgggctggtggtactgcaatgcagaccgcagttatactacaaacggctggcagtatattgacaatctttggtactattttgatgaaaacggttacatgaaaactggttggatcttatataaagatgcatggtattactgtggtgaaagtggtgctatgttggtgaatgcaacgacactggatggttattatgtaaatggtgacggcgtctgggtacagtaagggaaaatagatagaaaatgattttaaaagatgaaagttgaggcaatgcgattatgagcagatatagaagcagaatgggaaatgacagaaaggccagaagagagatcggaagaaggctgcgaaagggcggtgtgatgatgtgtatgatgatcaccagtgccatgttgttgtcagcttgcagcggcggaaacagcagcagcaagaataccacagcagcgcagaccacagaggcagcagcagagggcggtgtacaggacagccagaatgaggtaatggggcgtgtgaagttggtttctgatacagagatcacagttgagcagggacctggtggagcaccaggccagaacagtgacggccaacagccaggcggagcaccaggtcaggacggcgacaaccagcagccaagtggagcgccagacggccagaaccagccaccacaggggggagttccagagggaaaaggccagccaccccagggcaaaaccacaacttataagatcacaacatccacaaccttcaccgatgcagatggtgcattaatccaggtttctgatatcaaggacggtgactttgttaagatcactacagacggcaatggaactgctgtacagatatctttagctgatatgccaggcggtccggatggtcctcagggtggacctgaaaatggggcaccgggaacagatggtcctggaggcggggctcagtctgcacccacatcttattcctctgtaaaggaatttaccagtgatacagaagagaccggtcagagctatatctcagagggtacggatgaaagcgcggttcttgtatctgacggggccaatgttactttaaaggattttacagtaaacagaacctctgaagacagcaaaggcggtgacagctccagcttttacggagtaggcgcatcggttcttgccacagacggaactgttaatctaagcggcggaaccattacttcggatgcagatggagcagcaggtgcatttgcctatgacaaaggtactgtaaatatctctgatactaccattacaaccacaggaaacacagcaggcggtatccacgtagcaggaggcggtaccgtcaacgcggaaaatctgacggtacatacttccggtgagtcttctgcggccatccgaagtgacagaggcggcggcaccatgcgtgtaaagggtggcagttatacatcttctggaattggttcaccggcggtttactgtacagcagatattgaggtgaacgacgcaaagctgacagcagaaaattctgaagcagtgtgcattgaaggcttaaattccctgtcactgacaggctgtgacctgtccggccatatccaggaaaatgagcagaatgactgtgactggaccgtgatcttataccagagcatgtccggtgattctgaagtaggaaatgctgtatttaatatgaccggaggcagcctgacttctgaaaatggcggtctgttttacactacaaatacagaaagcactttttatttaaacaatgtaaatattaccccgtcttctaataatgaatttttcttaaaatgtacgggaaatgccaataagagaggctggggacagagtggtgcaaacggagcggattgttcctttacagcagaaaaccagaaaatggaaggagatgtggtttgggacagtatcagcaacctgaaatttaagatgacagagggaagcatccttacaggcggcttcatccaggatgagtcctgcgccggaaatggaggcagcggaacggcagatctgtccattgatgccgaatccacatggatcgtcacaaaagacagccggttatcaggactcacaaataaaggaacgatcaaagatgcagatggtaaggctgtaaccattaagggaagtaacggaacagtgtatgtacagggagacagtgcttatacagtgacagtagattcttatactgcataataaacggaaataaaaatgggtactgtggagatggtgtttttctcccagtgcccattatgttctcgcagagtcattttgtatacttattgatgttgtgttttttcatccatttcccggatgatcttctggtcttcttttaattcgttctgttctttctggagctctttttgttctttctgaagctctttcttttcttcttttaattcgtcctgctctcttttcagttcctggcgttcttccttttctattgcctccagatcgtcctcttcttcgatcagcatcagtaaaaagcagaggatcaaaagcccgcaggagatccagatggtgcggtaggagaaatgattggtaagatgaccaccgcaggcggcaccaatggtaaaggaaccgatcgcagtaagataaatggcagctgttttcagctcatcttttcgtttctcggtaatagctttataaaaatggtccatgccgcttcgcagatttccgatacacatggtgctggcataagcactgccgcgtacagtacggaaggactgaacctgcatagcgcaggcaaaggaagtaagtccatttgcaagccagtttaactgtcccgggataaaaccgacgataaacagtaggataatctccagagtcaggaccagatggcgccagtggatctttcctgtgtgacggaaccgggagtggatcaggcaggccattaatacacccagtgcgaaaaaagcaacgggaaggaaataacggatggaatttcgtagatcctcggagatcaggtagcatcccattaaaacaatatttcctgtctgtgcattggcaaagacgtgatcacgtaaaaaataggaacaggcatcctgcgttccgccggacagatttaaaagtatcataacaggcagcgaactggacatttgcaggccggttttttgtttcatgtatatcccttctttcattccctgttttatcatttttttcaaataaaatcaatttgcgtttttcacacttctgactttatatattcctgctttttctacgaaaaaagcagctgttggaaaaaaccagtcagctgcttcttttatgtctgttcaatgaagtggattttcacgattttttactcgtcatcctcattagccccatcattatactcatttacatagatcagatggcttctggactcttctacaatagtccggatggtctctgcagtaagaggcatatcctgaggctgtaataccaggcttaaggcacatggaagattaataccgcagatcaggtgacgatgatcgtttacatatgggcagaactgctggtttacactgccacctaacatatcagtcatcatgactacttcatcctccgggtcaaaggaatcaaataattctttgatctgggtaggaagatcggtgtcatccatataggcactgatatcaatgatgccgtccatggaagtaagaaaatttaatgtgtctttcaggccgtgggccagtaaatgatgggaggcgataatatatcttctcataacgcttctccttatagttttatagttatagttatatttataatagtgtggcggggatcagatactacagggatttgatcagatgatctacgtaaagttctgcctctccctgtgggaatggagtctgcatactttcgtagccttttccaaattcatccttctctactatataacctgcactgtagtttgcatagccccatacgatgcgcataggagcattaaagttctttttgatctccattccgaaggtggagaacagttctccggggatggtgatcatctccaggtcacctaaatggaagataacagagcggagagtaacattgatgccgcctgactggatctttcttctcatatggcggacaccggaccagagaagctttttatcatcctctgtaacagcagcagccagcttcttttcatcttcagctaactgtgccttcatagcatccagatcataagtctggtggatggtgtattctgcagtttttacagagccagcttttaactccataggagtttctgcttctgcgaaaacatttacctgcttcattacttcatcacgtacgcgccacagctcgttttcgtcatttccctgacggtactggcggttgcccatatcaccgcaggctccctgcatggtaatgaaaatggtattgtatttttcatccagggcctttcccacatttcctaaaagatcagagctgatcttcatgttgtggatgccaaggacagttggatggcaggtaaactggaacatacctgcaactacatggttttcattgcggaacaggatcatgttgatatctttatcgcttggtttgtcaatataattgcggtttccgtatacaccttctatggttccctttaccatataaggtgttacttctaagaaaccacggtcaaagcattcgtctacagcgtcaaaaagctgtttcattaccagctccctgtaaactgccttgcgatgatttctgtcttccccttcatcttcaaagctgatatcagggccagagtgtgtatgaatggttccgataatgatattttcctttggaacagaatattttccggcaaggactgtgcgggcataatcagagatcggttcttctaaccggcacagatccagggtggaccatataaaaatctccccgtcaatgcgcaggactaaagtcctgcagtaaagttcatctaaaacaccaatagattttcctgttctcatggcataaccgcgcatgtacataggaaatggaggtgtgatattacgttttgctgcgcttacttcaaccatatgataatctccccttagttgaataaaaaagggctctgcctgccaaataagacaggcagaaccgtcattatggtgatgtcac

SEQ ID NO: 3546 - DNA, 198 bp, Unknown
  gut microbiota DNA sequence
gacacctttccgaatgaaaaacagcgtataagccgcatgaatgcttatatttttttgtcaaatttgttgtttttatatataggctttttcggctttttatgctataatggtattgaggtgaaaaaattgaaggtcaatacatcaaaatcaaaaaacgctgagtctttttatataaagcaatcctacatcgacagtaac

SEQ ID NO: 3547 - DNA, 482 bp, Unknown
  gut microbiota DNA sequence
gcagatcagaatgctgcggtgaatacgttcccgggtcttgtacacaccgcccgtcacaccatgggagtcagcaacgcccgaagtcagtgactcaaccgcaaggagagagctgccgaaggcggggcaggtaactggggtgaagtcgtaacaaggtagccgtatcggaaggtgcggctggatcacctcctttctaaggaagaagaagtaggcattgaacacttaatgaggtcttaccgaatttagtgtgaaagcccacccgaacacttgacgaagtcttatcgagtctagtgtgagtggtgagggttttatatactgtttagttttcaaatcaagggaaaccaaaattgaagacaaaacctttctggtgctgatgcgcttaggggacacacccgttcccatcccgaacacgatggttaagacctaagcggccgatggtactatactggagacggtatgggagagcaggtgagtgccagatcata

SEQ ID NO: 3548 - DNA, 159354 bp, Unknown
  gut microbiota DNA sequence
gccgcactctttgtgatctggttcctgccataatactcttccatggcagctgccagtgctgcgaattccctcttatccattctctgcccacctcctgagccgttctgccttatcatcggttgctcttgccgctgtctttcctgactgcgactgcatgtaaagagtttcaaacttttcccggaatttcttggtgctccggatattcgccttccagaactggtttgtgaccgcatactccaatgcggtgcggatctgctcctctgtccggtggtcaatgcggagcatccgttcaatgtggacacaccactgggacctttcttcgtcggttgccggaaccctggctcccgggaatccttccagacaggaatggatcagggtattgacacagagcatctcaaaagaatccggtgaaaacagggttgctgctcctgctgcaacgccactctctttatttacttttatttctttttctttacttttcttttctttacttttctttatgtaatttttccgggaattatcgttattcttccgggaattatcctcatttttccgggaagaatgaaaagaagggttcactttaataaagggttccgtttcatccgcttccaaaagccagaaaccctttattaccaccggtgtctttttggcgcgttccttaaccgccagctgataccgtttctgtattccgggtgaggtgaggatagtgtccgacttgaaaagtgtgctgtccagtagtgaccgttcaagcaagaatgtcagcacctgctctatgaacccatctgagagattcaggtctgctgccaggatgaacttaaaatcatcgttccattccatgtagtagccttttttgtagatctcgcagagtaaatagatatataccgcgatcccgttattgccaaacctggcacgcaggatccggatcttattatccgtgaaaaaatcgacatcaagaggaaagtaactaagacctggcttctgctgtcttggcattttcctttccttccgttatctgctgtccagcctcccactctttgtagagctggatccagtcttctaatctcatggtgaccagccattctgaccggtccctgcggtggaatacacacggcttttccccagtcctggcgtcccttttggactattccatggcttcctggaggtttaaccgttccactctcttacattctatatggatgcctgggagaccgatcacatccgcgtcaccgctgatcccgcagaactgctgccctctgcggcagtcatagccgtggtctcttaactttccggccagttcccgttctccacgctttcctttttcccgttgtgattttcccataacgatcctcatctttctttaaaaaggggcggcggtcagcgaattgggttcatggtccgccccttcaggtacaacacctctggtcatttaatatcgtgacatataaaactgaccttcaaggtaataaaacaagctttttcaaacacaacggattatccgatgatagtaatgcggtttctgagttccatatcctgttctgacaggactaactccagataatctttgatctttcttactgcttctgtcttccagatgccgccctctgcctccaccagcttaaattctggtgtgcctctgtctccaatacggaatacaaactggctgaccggctgttctacttcctggaaggtacggtaaggtcttaactggaccgggtttggtacgatcgcatctgccttggctgctactcccacagtcatagttgccacctgggtacaaccgtcatcggaataggtctgttcattctttctttcaatatttccggcaagcaggagcactgcatccagatccgctgtttttgcaaagttagcctgcaggctgatcataaaactttcctggtcgtaccactggtcaaagtggaagccggaaacctgggcatctgtttcaaacaggacctctcttttacgttccccatccagggcagacatcagcctgacttttgtaggacttactacatggatgatcatccttctgccttccgtaaactcttccctgcagtttacgatgtaatctgccagtgctgaaagggtcgtggcctttacaggatcggcataattagccgtatcatatcttctcagtgtcttgttggcatatgtatggccgcagatctccactacttctgttttctcattttccctggcaagatcttccacatgctccagggcatcttttaaaccttctaacatcgatcatctctcctttactcatttatcttttttatcatgcctgctgtcttcttaagtcgatcggcccgttccttctgtcctcaaagatctcaccggtctccggatccacccttctgccggggctgacctcttcataagcagctgcagggatctcctgtaccggattgacctgtggaagcctgcttcccggctctgacatatcaatacggcccgtactggagtcctgtcccaccaggaacatggtctccgctttcttaaatccggccagtttcggcttcacgttatactctaccttcaggttcccacgcccggccggtttgaacttgatattgatcgtcatttccctggcagcttccggatccatgttcggatccaggatgttccttccgatctgtctcagggccatgttgaacttctcctgcagcccgccattgccaatgctatcaaatgttatcgccatgccttgatcacctcctttctatcatgctttctaattgaaaaagtcatcagctgcatccatctgtggctgtggcattgaaggaacaggctgctgcacatctgctttttcttcaataaccggctgtgtctgcggatcaatcacatctcctgctgcatactccggctctgcagctcccatttcttccgctacatacatgcctgcaaatgactgcggaaaagcttcccttaatgcctgcactgctgcaactttccggatcatagttgcaggcttcttggaccactgcgaattaaggcttccgtctttcttcttacctgcatactcatcaaaagaaacctccatgcggaaactgtgacttctgtctttgcgaaatacttctgcatagcctcccactaatatttcaccggaaagcttcaacgttccctgtctgtaactaatctcacctgtttcttcgttctggacaatgatacctgcttccatgccgtcatagcttgcatgtgcctctgccctcttgaaatatgcgtcctttccaactaccagagtagcaggctcatttccatacttgatgcagtacgcttcacgaagccatggattaagaccggtaaagcggcacaggttgataaacatcgcaacttcctgatcagataccctgtccttatccccgctgatcagataattctttactgttccaggtgtaagtgttacctgcataccgtttgccatatactttgtagtttctaccttctgtaccggcttatttactaatttgtttgctactgccatttctatgtcctcctcttactgtttcggtaccggctcaaaccggatgccgttctcttttaagaatccttttaacttcatcagctgctccctggtggcatagacccggaaatcgatcacattgaccggctcttccacggtctccattttaggttcttctgccttaaccggtcctgcaggatctgcctgtacgttttcctgtcttccggctgccatcacgctctcagctgcggctttcctctgtgcttcctgctctgcctttctccttgccatttcttcctggtaaagcctgcggttctgttcctctgcctccagctggtttctttttgccatggccgcgccgatatcataagtctccaaaaagattttcttcatatcaccggcataagggctgtccacttcatttaagacagccaggccctcatccaccctctggatcagcgccaggatctcttccttaatggacttcattgtagtggaagcaagggcatatcttggctgcatcacacgttcaaacggaagatacttgccaatgtcatggatgttatcctcatagaactccctgaccttggcggtcttttcctcacgcaggcgttcttcatagcctttgatctgatcatcaatgttagaggctgctttctggatcatgcctgtaatttcctggacctcttttccgaactgctcatccggctccaagagcttcttacggatacgggtacgttccttctttaatgcatctgataccttattcagtttggccctgtcttccttggcctttttaatcatgtcatctgtataaacagaattggcatagctttctattgctgctgcgatctcctttttaagttcgtcatagttccagtcgatcttctggataaagcccgtatcctgcgggctgtagatcttcaattccatcatgtacgctctccttttcctatattgccgggagaatcagatccggcctggtacctgtgatcacacagttccagaacttccgttctgactctaccagacactctatatcctcctcgacttctttacgttcaataaagtaatgtcttgtctcgatccgcatccgttccccttgtccacttttgatctgggcctttaggactgcaaaatcgtattctgttactgccagataatgaagtacctggcagaagtaattatccgggatcttatccctccatttctcccactgggaaccctgaaggatgtttgtggtcttgatctccaggatcccatgacgtccggtactgtccagaagctccccgtctaaagaagcatgcatccagggatacttagaattggtaaacatgttatccggatcataaaagactttgtattccggatgatccaacgcgaacagcgcacgaagatgttcttccgcctctgttccatactggacataatccttatcagaaatgtcttccggaagcaccagtcctaccttttcttcccagagttgcacgttatccttataaggatttagtcccacacaggcagccgcatccgaaccgcctatatggttctttctcccctgcagccactcttcccggctgttaaacagctttttagttaccattcgtaagcctttctaacatctttgctttgcagctttccccaactttttccataaaagttgtcaacatagcaattgcatgataatcgtcttctgcaagagtattaatcgcatctaccgtagcatctgctaaaccttgaatcatcgcagaacttcttaatcctttgccacccattacagctaactgaatctgctgctcttctttcttggaacccaaaccgattgccacaaccagttcacagtcttcaatttttcttactcttccgtcatccagtgtaatcttcgtttttaccatcttgcttttctccttctccctccgtataatgagggtgtaaaatgtttttattaccggaccttccgcagttaccgctgcctgggtcctttttttaatttaaacctgttcatcagtagctcccccagcatgcaagcatgtatcctacaagcattgccgctgccgtagcagctatcattgcgggaacagcctgataaactaaatcaatgatccagtcattttctgcttcagcaattcgttttttaatagtgaccacttttctacgcccatccatagaagtaaccacaaagctatgcttatcagttatatcaacacggctacctggcactgatttgagcgtatatctttcaatacggtcttttgaaatttctcttctcatatacacctcatttcaacgttctaacctgaccataacgaccaacttcaactttcggaaaagcagctgcttttctttcccgcgttcgctccggtggatttatttccattccactattgacccatgcctgaatatcttctggcagtgtatcaaggttgatcagaatcttgcgtccacggtgtacactctttacagtcccctgtgatacaagagccctgaaacaccgcaatgtgattttgctttctggatcctgatcgataagccagctataagcttccggtatccctcttaaccgcggaataatacacattctttctcacctcctactccaacagcttctcaatgggtaaatgagaaccgttaatatacttgttttccttatctccctagtgatatactttccatacaggcgttgcagcgccgagtacaaaaggaaggagaaattacccatggatttcaaaatcaaaataaaatgtcataagtgcatgtgcaaatttgaacttcgacctgaatcaatcaattgcactaaaattatttgtcctaattgcacttccgaagttaaacccgaatattctgcacatatattaaacggaataagagaacttagtcttgtcccagaaagctattccgacgatgatgaactcatttatccgcaaacaggtttttcttttgaagtacaacactattcatcgatacaaggacttaaagaatagggaacatcatttaatgcttctaaagtaatatcaaaaacttttttcgcctggttatatgacagcccgctgctaataaccaggtcacctattttattagatatctgaatcaacttttgatttgaaatttgttcttttacaccatttgttctattcgttttcctcgcctcctactccaacaggtcttcaatctgaaccccaaagtatatcgacaattttctaaggctctcaatacttggcatggatcgtccagacttccaatttgaaaatgccgtctggctaattccggtttcttttgatatctgatataccgttttgttcgttttttctaaaagatcctgaaattttttgtacaaaataccatctcctttccgtaagtatactattgaaaatactttcgtgctgtgatatactttcagatataaaactaccacatcttataaaagtaagcatatcgcagttgaaagtatttatttcgcttgctttcgcttgcgtaagtaaataatacaacatttaatgttagtagtcaagtgattttactaacttttgcgaaagtatgctatctttgtgaaaggagcacaaaaatgtacgaagtctttgaacaacttctacaaaaacatggtgttaccccttacaaagtcgcaaaggaagcaggcgtaacacaaacagcacttagtaattggaaatctggaagaagtacaccatcttcaaaaacattacaaaaaatagctgattattttggcataacagttgattacttaatgactggtaaagataatcctaaagaaaaagccccagagctcactgctaaagacgaaagagatataaagaaagacctcgataatattatggaaaaaatacgtaacggcgaagacggacctctatattatggtggtacggaaattgacagtgcttctttgagcttacttcaaaatgcatttgaatacgccctaagagaaactaagaaagaaaacaaagtcaaatacaatccaaataagaataaaaagtaggtgacgccgtttggagactgtaaatcataagattcgtcgtttaatcaggtactatgaacatctaaccggcagccgagatcctgttaccattgcacggtacgccgagatccagattgcagtattaccgttaggcaatatttctggaaactacaaacttttaaaaagaaaacgttggatttttataaatgaggatatcccttctgacagtccactctttcgggtcgttgtagcacatgaattaggacatgctttattacatagaaaagagaattgtgcttttctaaagaataaaacattactacttacatccggaatagaaagagaagcaaatttatttgccgcttcccttttgatatcagatgaaatgttgcaagattattcctgttatactcaggatcagttctgccagtgtacaggatatccaaaagaacttattgaattaaggttaaagcaatgacatattaaaaaacaaaagaaacgaggaaaagagtatgaagaaagtaaagttatttttcgctgtcagcgttgcatctgctgtcctttctatgacctcctttgcaggagaatggaaacaggatgcttctggttggtggtaccaaaatgatgatggaagttatccaacaaacacctggaaagaaataaatggaaaacaatattattttgataataacggttacattttaaccaacacctctacccctgacggtcagaaagtcgatgccagtggtgcactgataaccccactttttagttttgatacagatgatgccaaaattacttataccggttggaaacttgcatctgattatgatggctatagttgcgttatactgtattatgattttacaaataaaaaatctgaatcccagagcgcactcttagctgattattacattacagcatttcaaaatggtattgaatgtgataccacatggctttcatatgatgatcgtgatgaggcattagataattattcaaagaaagttactcagggaactaccataaaggtaggaaaagcttatcgtatcaaagataaaacacctttaacattagaaattaaagaactttttagctggaataatccaaatactcaaacagttacattaaacataggttaaaatgtcataaaacgcaagagaccgcccctgcgccaacaggaacggcctcttacatagatttctcttgccagattgctctggattgatcaatcactttcaacatgtgaattatatcatttccggaacatcctggcaagggtgttatttttttacacttttttaggaggaaggactatggcaagcgtaagaaaaagaggaaattcatatcaaatcaccgtatctgtcggaagagatatgtacggaaaaaaaatagtagaaacagcgacttttacaccggatccaggaacagggaagcgtgaagaaaaacaggctcttaatcaattcgtagctgattttgaaaaacgtgtaaaatccggtgcaaatattaaagctgagcgaatgactttgcgggacttatctgaaatatacttgaaagatatggtcccaccactattggcccgaacaacatatcatgattacaaaaaaagacttgaaatgcggatactcccagccatgggacacattgcgatcaatagcatccgccagaaagatattaacgattacaaaaaaatggtaaatgatacctatgtaagcccctctacaaagaaaccactctctcctgcttccgtgaccaaagactgcctggttatcagcgccatgctttcatatgccgtatctgaaggatacctggaactgaataagctgatatactctggaaaggtttcaaagcgccgtaaatcgatcgcagatactaaaccacagtattttaccgtcgagcagctaatccgctttattgacgctttaaatcatcctatagaggttgttcatcaagaacatgaagttatccgaagggggcaatctgtaaaaataaagccttacacccaaacatttactgtaaagaataaatggaaagtatatttttacattgccatgttcgttggtgatcgccgtggtgaaaatatatctttgacctgggaaaagttgaattttgaaacaggggaattatatatcaaccagtctactgactatgtggacggaaaaatggagcttaaatctacaaaaacacatagcgaacgctgcaatactctcccgccttttgttctggatgctgcaaaaaaatggaaaactgagcagatccaggaatgcttgaaaatgggtcctgactggaaaggctatcgaggtgcagattacgataagaattttatttttactcaaagtaacggcagccagatgcacatatgcagtcctgccggagaatacaatcgtattattcgtctttataaccagtacattgctaaaacacctgcagaacagcttccaaatgtatcaccgcatggattacggcattctgtagctgcattgcttatatctgaaaatgtggatgcgcgtacagtggccggtattcttggacatgctaatccaactaccaccctcaatatttactcctacttttttaaatccaagggcaatcaagctgctaaaattattgaagaaaaactggtaccaacaagcctttttttgacaagataaaaaaaggtctggtagtcatttggtagtcaaatggtagtcatttggtagtcaaatggtagtcatttgagattttcaacaatattatgtaaactatttcaaattcaagaaataagaaaaacccttgtaaatacaagggtttcaggcaaagccactggccggactcgaaccggcgacccacgcattacgaatgcgttgcgctaccaactgcgctacaatggcatatttatttaaaaaaataagaccgctgcaaatgcagcagcctcatcaagatgacctgaccgggaatcgaacccgggtttacgccgtgagagggcgtcgtcttgaccgcttgaccatcaggccttgtaataaatcgaggcgacgtgattcgaacacgcgacctctgcgtcccgaacgcagcgctctaccaaactgagccacgcctcgatctcgattacgttacacagtataatacacattcttccaattgtcaactataaattttcaaaatttttaattttttttagacaactagaaaaataatgatcaaacaggggtcagcactgctgttttcctgtgccaacccctgtgtttcctacatttttcactgatcttaactgcttctcatttaaaagaattttgcaatatatccctgagccaggataaaaatcacgatcagcggaaggatgtagcttacgtaaaaacgtgcccatcttgggaacttaatgccagatccctcatttgcttctgccaggaacttttcaaagccccatccataacggctggtgcagaacagcagatacagaagacttccaataggcagcaggttatcactgaggataaagtcctcaagatcctggatattagaacctgctcccaatggctggaagctgctccagatattaaatccaaatacacatggaagagacaggatgatcactactattacattccatgctactgctttctttacagaacagccggtaaggtctgttgcaaaagaaataatgttctgaaatacggcaattacagttgaaagagccgcaaaggacataaatataaagaataaagttccccaaagtctgccccatgccatatggttaaatacatttggcaacgtgataaagatcagggatggaccggaagttggctcaactccatatgcaaaacatgccgggaaaatgatcagaccagccataaatgcaaccagtgtatccagaatggtgatactgatggcttcgccggtcagacggcgttcttttccaatataacttccgaatatagctaacgcaccgataccgatacttaatgtaaagaaggactgtcccatagccgcaaaaatggaatttcccagtcctgcatctaccatttttccaaaatcaggttttaagtaaaactccagacctggagcaccgccctttaataccatggagtggacagccagtgccatcataaggaataacaggcagaccatcattacttttgtaatacgctctacacctgcaaccagaccctgggcacagataccaaaacagagaactacaacaaagatcataaatcctgtcattaatgcaggatttccaagcatgttggtaaactctcctgctactgcatcggagtcaagtcctgtaaaatccccacgaagcattttgatgaagtaatagatcatccatcctgctaccgtggtataaaacatcatcagcatgtagtttcctgccatagctgcatagcgggtcagatgccattttgtacctttcggctccagcatgttaaaagaaagggctgcactgcgcttgctggcgcgtcctacagcaaattccattactacaataggaagaccaaggatcaggagaaatgccagatagatcagtacaaaggcagctccaccgtaagctcctacaatgtaaggaaatctccacacattgcccagaccaatggcacagcctgctgagatcaggatgaagccaagtctggaagaaaatttttcacgttccattgaaagtataaacccccatctactttgatttacgctgttttcatttttttccagcgcatatactttaacactttggtgcgtcaatttgcccctaaagcgcaagaaagagtttttccacactccacatgtgaaaaaactctttcaaaaatataccataaattcttttataagtcaattttatgataccagactactatgcataatctcttacataatctcctacatcagctcaaataaatttaactgattagactgaggaaggtctttaagcagtccaaggtctgacatcagggaacagatagttccatttaccttggtacggctggagaaatcttctactgacaggaacggaccatcttttactgcatctaccactgcttctgccgctttttcacctaaaccgtcaatactgcttaaagaaggcatcagcttaccgtcaatgatctggaaatgtcttgcttttgccttataaatatcaatcggcacaaaatcaaagccccttgcgtacatttcctggacaatacgcatgtcacgcagggtatcctgctcctttttagaaagagtatcggaacgttttttataatctgccagataatattccagtttatctcttccctgacacatgatctcataggaaaaggcgctggcgcggatactgaaaaaggccgcatagtaagccagtggataaaagatcttacagtaggcaatacgccacgccatcataacataggctgccgcatgtgctttcgggaacatgtacttgatctttttacaggaccagatgtaccagtcaggcacaccatgcgccttcatatcttcttcccactccggctttaaacctttaccttttcgcacgctctccatgatggtgaaggaaagtccctgttccattccctgggcgatcagatagatcataatatcatctcgggtacagatcgctgtctgaatagtagcttttccttcctggatcaacgtctgggcatttcccagccaaacgtccgtaccatgtgccagaccggcaatacgcaccaggtcagagaaatactttggtttggtatccagaagcatctgcatagcaaagtccgtaccaaactccggcacaccaagagctcctaaaggacagccaccgatatcatccggcgtgatccccagtgcagaggtattctgaaacaggctcataacctccgggctgtccagaggaatatccttaaccgggtccagaccgatcaggtcctgcagcatacggatcatggtaggatcatcatgtccaagaatatccagttttaacaggttgtggtcaatagaatggtaatcaaagtgtgtggtaacggtggaggtagtcatatcgtttgccgggtgctgtaccggtgtaaaggaatagatctcttcacctaaaggcagtacaatgatacctcccggatgctgaccggtggtacggcgcacgcctacacagccctgaacaatacggttgatctcgcagtttcgcttcctggttcccctttcctcataatatttctttacataaccgaaagccgttttatccgccagtgtaccaatggttcctgcacggaaagtctggcccttaccgaaaataacctccgtatagtcatgggccttactctggtactcaccggagaagtttaagtcgatatcaggctccttatctcccttaaatccaaggaaagtctcaaatggaatatcaaacccgtctttttccagaggtgttccgcataccgggcattttttatccggcatatcgcagcccgccataccggagaacttacgcacttcttcagagtcaaaatcatagtaacggcactttggacaatgataatgaggacttagcggatttacctctgtaataccggacatggtcgccacaaaggaggaacctacagaacctcgggaacctaccagatagccgtcttcattagatttccaaaccagcttctgggcaatgatatacataaccgcaaatccattggtgataatggaatgaagctcacgctccagacggtctactacgatctttggaagatcttcaccatacatttcatgggcgcggtcataacagatctttgttaaggtcttatcagagtctgggataacaggtgggcacttgtccggacgcaccggcgcaattttttcgcacatatcagaaatcttacgggtattggtaacgactacctcgtatgccttatccggtcccagataagcaaactcttctaacatctcttctgttgtacgcagatatagcggcgcctggtcatcggagtctttaaatccctgaccagccatgatgatacgccggtaaacctcatcctgaggatccaggaaatgaacgtcacaggtagcgcacaccagcttaccaaactgggttcccagatctacaatctttttattgatctcgatcaagtcttcttctgtcttaactgtactcttttcatcccggagcataaacgcattgtttcccaaaggctggatctccagataatcgtagaaatttaccagtctggcaatctccgcatcgggagccccgcgaagaagggcctgatataattctcccgcctcgcaggcagaaccgatcagcagaccttctctgtacttgtccagaacgcttttggggatacggggacgtctggaataataatccaaatgggaccagctgaccagacggtacaggttgatacgtcccaggtcattttttgccaggatgatcacatggttggtaggcagtttcataatggtctgggcatccatggtacttaattcatttaagtggtccagatcttcaatatcccgatcccgcagcatctttacaaaagctgcgaaaatctccgctgtagctcctgcatcatctactgcccggtgatgattttccagggaaatatttaaagctttcgctactgtatccagcttaaaacggtttaagtttggcagaagaaggcgggccagagataccgtatccagtactgttggtgaaaatggcagtcccagcgcttctgcataatgaccaataaaaccaacatcaaaacctgcattgtgggctaccagtactgcgtctcccacaaattccagaaactgaggtaatatcacatcgatcttcggatatggcagtaccatagcgtcattgatgctggtcagcttttcaatatcaaatggaatcggcacatccgggtttacgaaagtagaaaacttgtccgtgatcacaccgtctactacttttacagcaccgatctcaatgatccggttctttacagggctgaaacctgtggtctcaatatcgaaaacaacataggtatctgcaaaagtctgtcccttggaattttctaccagctgcttggtatcatctaccagatagccttccacaccatacaagatcttaaaggtatcccctttatccaatgcatggtttgcatcagggaaggcctgaacgcagccgtggtccgtaacagcaatggaggacatgccccattttttcgcccgcttgatgatgctctttacctcagaaacaccatccatatcgctcatttttgtatggcagtgcagctccacacgtttttccaggctgttgtccatacgcttggtggtaaagtcatcggcctttttaatacctacaatagagcctaatgtcagttctccgtcaaacttatcaatggtggtaacacctttgatcttaatgaacatgcccgttttgatcatgtcctttacttcattgaagatttccggacggatgaacatttttgctgtaatggtgtctgtgaagtctgtcacatcaaaggtaagaatgaatttaccgcttcttagctcgcggctttcacaggttaagatctgtccacgtaaagtaacttctccgatctctccgtcgatcttctcaatctccataaagtcatcttcaaaatcacggccgtaaagtacatccggattattggaacgtttaacagaaaacttcctgtcttctccaaagccggagtctttatctcttccccagccttttcttcctttgttaagctgaggtttttccgtttttccgcctgactgtggttttgcagcagctgtttttcctgcatccactggttttatgccatctgatacaggagaaatattctcatcattgccaggaacatttccggaagctgcctgatccataagagcgtcccatggagctgcctccggcataggaatatccataatagcagcattactattatgagtttttttctcaccattatcgctttttgcaactgtctgcgagatattttctccaccacttgcattttctaactcatccttatgattttgccagtaaatagcctgtgcttctctctctaacttcagttcaatctgctttctacggtcattttcctttggcggaatgtactgaaacgctacttctaccggcagaccgcaccgttcattaaataccttttccaaaaccctctttaactcattggtcttgtcccggttgaccatggtatcttctacagtcagcaccatttttccttcatcttcaaagacgatctgggctttgcggaacatactgtattctacgatgctgtaatgctttaattccagcagcagactgtccttatacatttttaaaagcttttccggtgtgtactgaccagacagtctgtatttttcctgtatcttaatggtaatctgtttatccggaaacagctggtctttgatgccccgctccagatcatagatattttgtttatggatcagccttgtgcttttcatataaacacgaatagagcttctatctctggcagaagtaactttttctacttctgccaaagctaaaagctcctttaaaggctctgcaatattaagggttggaaatacttctaaaaaaccttttgccattcagattacttctttcttgcttctgccattgcttccagttcactgcgaagggagtctaacagatcttcttccggtacttttcgtaagatctcaccttttttgatgatcagaccttcacctacgccgcctgcaatgccaatatcagcttcccttgcttcgccaggtccattgactacgcagcccataacagctactttaacaccgtctaagccttccatgccggaaaccatggtctctacctggtttgcaagatggatcaggtcaatacgggtacggccgcaggttggacatgaaaccacttctacgccgccttttctaagtcccagagttttaaggatctgacgggcagacttgatctcctcgattggatcacctgtaagggaaacgcggatggtatctccgatgccctgatataagatgatacccagccccacagcagatttgatatttccggaaaataaagttccggcttctgtaatacctacgtgaagaggatgatcggttctggaagtgatcagttcatgtgctttcacacacattaatacatcggaagatttgatactgatgaccagattgtcatagcccatatcctcaataagatgtactttatccaaagcactttctacgataccttcagctgttacaccaccgtatttttccaccagatctttctcaagagatccgctgtttacacctacacgaatagggatatttcctgctttcgcacggtctactactgcttttacgcggtctgtacttccaatattacctggattgatacggatcttgtcagctccgttttccatagctgcaatcgccagacggtagtcaaaatggatatctgccactaacgggatgtggatctcttttttaatatccttaagggcttctgccgccttcatggtaggtactgccacacggataatatcgcagcctgctttttccaggcttaagatctgtgctaccgttgcctttacatcttctgtttttgtattacacatagactggatgaggatgggatttcccccgccgatcacccggtcaccaatatgaacaacttttgtatcctttctgctcatgtttctttcctctttattcttaatctccgattgcatgccgcctggaggcagcacttttataataattttcttacatcattaaacatgataaataccataagtgccagcagtaaaaacataccggcagcatggaccattccctctttttcacggtcaataggctttctgcgtatagcctcgatgatcagaaataccagacgtccgccatccagtgcaggaagtggaagcaggttcatcacacccaggtttgcacttaaaagaatggcaaaattcacaagtaccatggcaaccactgtatttcctgcaggtgctgcctgctccaccgtctggtcaatggtagtaacgatccctacagggccactgatatcatctgcgcttactctgccggcaaatatcatatgaaaactgtcaaatacatagtagatccagtgttccacctcataaaccgactgcaccagcagctgcaccggatttgtgatcttctgaagttttgcctcaaaccgcacaccgatcatggactgccctgtcttatcgttataaaccggagtgatctttgccgatctcttctctgttttcccattttcatctgtatgtttccaggtaatggtcacatcctgatgaggatgggctgtaagataaggtgaaagatcccggtaagaatggaccgctctgtggtctacttttatgatcacatctcctgtaaggatccccgcctgctcagccgggtacccttcttccacacccatgaccaccggctcataaaagccaccggcacagcctacgataacaagggataacaggaaagccagaatgaaattaaataaagggcctccaaaaaccacggcaatacggttaaatacaggtttgttattaaaagccctgtccccttctgcatcctcatcttctcctaacatggcgcaggaaccgccaaaaggcagaagttttaaagaatatctcgtttcgccttttacaaaacttaaaagcctcggtcccatccctaaggaaaattccgtcacttcaatcccgcttaattttgcgaatataaaatgtccaagttcatggaacaggatgattcccccaaggatcagcactgccagtacaatattcataggatttcattcatcctttcctgttttcatttatggtaatatcaccgccaggtgacatatccgtttaacttaaatattccactttgaatggataaagtcataagtttctgcttccgctgccaggatctgatctacatctggtgcatcaaccttcttatgatgctccatggatgcctggatcatgtccggaatggtcagatacgagatctttttctttaaaaacagacttactgccatctcattggctgcattaaatacagttggcatacttccgcctgtctttcctgcctggtatgccagttttaatcccttaaatgtttccggatccggtacatcaaaggtgatctcacgaagctttgtaaagtccagtctgtctcctggaagaaaacgtctttccggatagtataatgcatactggatcggcagtttcatatccggtgtacctagctgggcgatcactgctccatcttcatactcgatcatggaatggataatacttgcaggctggatcactacctggatctgatctaaggatacatcaaacagccagccggcttccattacttccagtcccttattgaccatagtagaggagtcgatggtgatcttgtggcccatagaccagtttggatgctttaaggcatcttccacctggactttttccagctgttctcttttccatcctctgaaaggacctccggaagcagtcagaaggatcttatggatcttatttccggctgctccctgaaggcactggaagattgcagaatgttcggagtctaccggaaggatcttcacacccattttctttgccaacggcatgataatgtgaccggctgtgaccagtgtctccttatttgccagagcaatgtcttttcctgcttccatggcagcgatggtaggccggataccgatcattcccactactgcggtaactacgatctctgcctttggctctgttgcaacagtgagcagaccctccataccggaaaggaccttcacatccagatcttttaccctttctttcagttcttttgccttttcttcactccacaggcaggcgatctccggcttaaattcgcggatctgtttttcgatcagatccacattggaaccggctgccagagccgttaccttaatatctttattgtatcttactacctctaatgtctgggttccgatggaaccggttgaacccaggattgatatgttctttaccataattattctccctttgtaaaggaaatgcttaaaatcatgctgctccttttaatttaaattgcctatcttactatcttaaaaaagtaactgcaaaataaatagcaggagctgtaaatatcatactgtcaaaacgatccaggatacctccgtgtcccgggatcagatggccataatctttaatattgtggtttctcttaatagcagacgctgccagatctccgatctgtgagataactgccgcaatagcgcaggcaatggcgcaggcaaccatgggatttgccacttcttccatattatgaccaaaataagcgccataagcaaggcctaacagtgcagaaccaactacaccgcctacagccccttcaatggactttttcgggcttaatacaggcgccagcttatgttttccaagaagcattcctacacagtaggcactggtgtcacagccccaggagcttaaaaagatcagccataccagataagctccgtcatgcatgctgcgggtctgatacagaaaagaaagcattaccggaacatagcacacaccaaaaaaggcgccggttatctcttctgttttatagcttggaaaagtaaaaacatagagagccattaaaagcatcagggacgcaatgatcattaatgtaagatacttctgtccctcaaaccataagatcccataatagcagacagctgtcagatagccaactgcagctactgatcttttttcgatcccgagaacgcggtacagttcaaacaggcctaccagtgaaataagggctgtcactgcaaaaaggagggcgcctccttttcctacgaagaaaatagcaaggatgaccagtacgataccactgatcaatcgtgttgtaaacataaaaatctcctttttgaatacgttattttaccccgccgaaccgtcgatctctcttattatactgaatgatcgccttttccagttccttctcatcaaaatccggccacagacaatctgtaacatacagttctgtatatgccagctgccacagcagataattggacagtcttaactctccgctggtacggatcagcagatccggatccgggatatccgcggtatccagataagaagcaaatacagattctgtaatatcctctgcctccacttttcctgcctttacatcctctgccagtttcgcagctgctctgcggatctcatctcttcccccataattaactgcgatcacaaaggtaagtcctgtattatcctttgtctcttcttccagacggttgataccgtcaataatatcctgggcaaaacgtcttctgtcaccgatcatctttacccgcacattgttggcagaagcgatctttaacaggcggaccatataataacggaacagctgcatcagcgctcctacttcttcttcagatcttttccagttttcagtagaaaatccgtaaacagtcagatatttgatgcccattctggcagcgatctctactgtcttttctactgtaacacagccttctttgtgaccaaaggttctaggaagacctctttttttcgcccagcggccatttccgtctaaaataagggctacatgagccggtattaccatattactgtctaatgccattttcctcaccttttcttatcttattgcataaaacgaagaggcaggagtctctcctgcctccgtatcaatttcagagactatacagtcatgatctcttttgtcttttcttctactgccttgtcaacacgctcaatggtcttgtcagtcagtttctgcatcttctcagtcagatcagctaactcgtcctctgtgatctctccagctttctctgctttcttaaatgcatcatttgcatcgcggcggatgttgcggacagcaacctttgcgttgtcacctttcttctttacttcctttgcaacttcttttcttcggtcctcagtcatctccgggaagatcaggcggatgcagtttccgtcgttggtaggattgatacctaactcagatgtaaggatcgctttttcgattgcttttaacaggctcttttcccatggctggatcacgatcatacgtgcttccggaacagatacgtttcctacctgctgaagaggtgttggtgttccgtagtaatccactttaatcttgtctaatacatgtgggtttgcacggcctgcgcggatggttccgtaatcagctaacagaacttccattgtcttgtccatcttatcctgataaaactttaaatcttccataagttccctcctgaacatgcagcttttgctgtcattttatattcatagcgttttcgcttttattcttacttattgtgttaccgtaatgatcgatcaagcagtaacgatggttccgttgatacgcccctgcatagcatttgcaataccgtccggttcatttaagctgaatacagccattggcatcttgtgttccatgcacataatagatgcggtcagatccactactgctaactggcggtcaatcacttcctgaatggaaatggtatcgaatttctttgcctctggatttacctttggatcgctgtcatatacaccgtcaattgcctttgcaagaaggatgcagtctgcttccatctcaatagcacgcagtgtaatacctgtatcagttgagaaataaggatgtcctgtaccgcctgcaaagaacaccacctttccctctgcaaagcacttatttgcctgatctttggagaacagctgggtcatagtgccacatgcaaatggggtaaagatctctgtctgcattcccgcattacggaaaatctcagaaacatagatacagttcataactgtagctaacataccgatctggtctgccttggtacgctcaatggcatcgctggtacgacctctccagaagtttccgcctccgatcacaatacctacctgaatgcctgcgtctacagataattttacctgtcttgctacctcttttacagtatcttcgtcgaaaccggtctttttaggacctgcaagggcttcgccgcttaattttaagaatacacggttcattttcataaatgagtttctccttgtgttggattatacttttttaagtataacataggaatgtatttttggaaagattattttcactgttcgcggatccgttcacggatgctccttgcatctgtgtccgacaatggatcacagatatcatagatctttgcagtcagttccggatcatttcctacatttttaatgatccacaatctggactctcctgattttttaaaccggaggacttttgcaatggtaaacagaagttctttttcttttgcaccatttgcgtcacttaactgtttttgctggtaacgcttctgctttttctcatatttacttacctttgtcttttcacgctgggcaatggcagctcccggagtaccgtatcccttctctaaccatatggtttctacctgatacgttccgtcttcaatggtcataacagccatggaaagaggcagtgtattccgcttataaccacaacttccgggatttagccacaaccttcccgcgatctcctgctgctggtacatatgggaatggccaaagatcactacctgagcatctcctaatgccacagggatgtccgttctctgatgggccatgaccattttcacaccgccgatttcaaaacgtttgatccccggcagtcccccggaccagcctctgtcattatttccccttactgcaaaaagcggctgctttccgcttaatttcatatacagcatctgcgtatcaaaatcacctgcatgtacgatcacgtcgcaggtttccagtatcttctccacctccgggcgcagcactccatgggtatctgccatcattgccacccttacaggtccccgttccatttttcttcctccttggtttcacatatacacgctctgaaaataccagattattatatacgattattttctgactgacaatcatttcagccataacatcttcttgtattatttattttttctgacgattttgtgaacattattgtggaaaaaatagttagatgttatacttgcagcagaccattgtacattttgatataaatatacggatctgtacatacatgaaaggggaaactgtatgataaaaaattataaaaaactattcctgtcctttggagctgcagctgttttaagttccgcagctgcttttagcagcctggctgcaagtggcggctgggtcagtgaaaacggagtatggaaatatcaggaagcatctggaaattatgcctacaatacctggaaaacttccggtgataactcttactatctggacaataacggcgtcattgctgtaaaccagtggatcgatgatacctactacgttgacgatgacggcgtaatggcaaaaaattcctggatccagttatcagaagatacttcccagaagaaagcaggctggtattacgtggacgccaaaggaaagctgatcaaggataaatggagtaccatcggggataaaaaatacgcttttgacagcgatggaaaaatgcgtacaggctggttttttgataatgatgatatttattatctgggagacaatggttatgccaagaccggctggctgtgcctggactatgacgaagacaacaagccggatgatggaacgatctctgaaatccgtacttctgcttccgatactgccaaatggttttatttccagacaaacggaaaggcaaaacgttctaagaatgactcctattccgctgaaaccatcggggataataaatattattttaatgaagacggtgtgatgatgactggctgggtagctgtaaaaagcagcgctgaagcaggagatcccacaggtatcagcaaattcgtctatttaggcggagatgatgaaggcatcatggcaaaaaacaaatggctggaactttacaatcatccaggtgactctgatgacaaggacgagatcaccacagacaacagcgatgaagccccggacgaaggtgagtcaaactggtactactttgaaagtgatggtacccctgcttacttaaacagcaaagctaccaatatgagcaaggcaactaccaaggtagatggaaattcctatttctttaactcctatggtgtccgccagactggccttatccatgtggtaacttcttccggtaaagaatttacaggctactttggcgaaaatgactctgacggaaaaatgctcaccggtaaaaaatccaatttaagcgttgacggtgaaacagctgcttactatttcagtgagtccggctctgataagggctgcggttataatggttccaaagatgattatctgtattatcagggacgccttgtaaaggcagacagcggttctgactatcaggtattctgtgttgacaataaaatgtacctggtaaatgagtccggcaagatccagacttccagcaagaattataaagtaaacggaacctggacattcaaggtttccggcggttctatttatttcattgatgatgataagaaatccacaggaaaggttacttcttctgatgcggagtcccttccggaagtaatctatgataaagagtatactttataacgctttataatactacaggcctcggcattggtttaatcctctgccgaagcctttttgtatcaaaacatattttttaattttcatggtcttttaaaagttctctttttcgtttcttccagttatttacagcaaacacaaaatttccaatagccagaaggtctactgccgccagtcccgctgcccacaatgggaacggtgccttgatctccggttttaacaagctccagtcatccatttcttctgcatacgcctggtttctcactctcgcgtttaaatacatgtagatcacatcttttgctgactgccgcagtgcctgatcataggctgccttattttcttcatttttaaaggcaaaactgccatcattcataaaaccgtccatccagagggttccccctgctgcaagagcctgatccccgttcatatatttatgatggtcagaataatctgtaagcacagctcctttaaagccccattcatcccttaaaatgctggtaagaagccccttactgcctcctgcccacacagctcctatacggttataggaggacataaggccagtggcaccattatcctgtacgatcatctggaacggctttaaataagtttcccgcagggcctgttctgtcatccaggtatagacgccatccctgtaaataccagactcctggtcattgcatatcagatgttttacatagcagtatacacccatatccatacttccacttaccgctgccccgcacattttcccggaaagaaagctgtcttctgaataatattcatagtttcggccatcaaaaggactgcggtggatattgactgccggtgcataccagccgctatagccaaactgacctgcttcctttgcgactgcccgtcccatatcacgggataattctgtattccatgactgggccataacaccggcattgggaaatccggttcctgttggattttggttgaaactaccgatctgtgccggtccgtcagcttctctggctaatggttttccaatattttccagttcttctgtctttacatacccgtgaaggaacagctcctctgtctctttttctgtcagctggtttaaaacttcatcccactttggatcgtcataatccgctcccagttcgtaacccagttttgatacagttccgtttttttcaatataaaggccctgcttttttccaaatgccacatcatttttactctgagactcactttgttctaaaaagctctgcccaaactcatctgctttttcctgggtataaaggttcagttctgctgccttttcagaaagttttcgggtctttaccggttcttttggaaatgtcgtatcaaaatcactgcggctcatataggagatcttctgaccgctgtctgaaccatcgatccccactccgtctactgcgtcttttcctgtcattttattggaaacaactgtacctgtgatctcgtctgtaggatactggatattttctgccagtttcaggctgatctgggcatttggtatatcagcggtctcatgggcgtttttccgaagggaaagtacataggttcccggatccagctcatatcctgcaaaaccgttttgattgctgtcattaaaatcataggatgccatatctctggcttttacagacaacgtaacctcttctttttcccccggctgcagctctcctgttttcgcataatcagctaatactaccgccgatttttcgatccctcccgcttcatatggaggggcataataaagctgcaccacctctttgccagcccgttctcctgtattggtaacttccactgtgatcttgtaactgccgtccgcagtgatcttttccctttttcccggagcatttacaaccttccagtcaaaggtagtataagacaagccatagccaaaaggatactgtactacagcctggtaacctcttccatgaagattataatacttatcccagtaatcctgcgcatctgctgtttcgtaccatttatagcctacataaatcccctctgcgtagtctacataagatacctgatcatatttaaaggactctcctacattgccgcttttggtaccgtcaaaaggataaagaccctctccgttttcataacttcccactccgtcagctcctgcattggcatagctggcagctgtgcggaaattgtaagcccaggtatcagccgtgcggccggaaggtgttatttttccccagagaaggtctggaagtgcctctgccgaatactgtccggtcattcctgccatcacacaggccccaattccaggcatcaggtcaattgctcccaaggtcattacatttcctgtatttaataacaggatcacatttttataattttcacccagatagcgcaaaatcccctcttcttctgtggaaagatccagataggaccttcttttatctcttaacagctggccgttcttctttacttttttatactggacctgaggacagtcattgctttcccctgaaagccttcctactaccatgatcgctgtatctgaatactcttttgcgtttttaagcaaatcttctgtgtaatattctgtatctgtaatatccggttcataaagccggcagctttcttccggccagctttcaagagtagatgttttctgacgctttggctggaaatcctgatacatccgggtcagttcttcattataggcgattcccgcttcttttaatgctcctaaaagatccaggtctactttttccactcttccggaaccggaaccgcttcccagccactgggtggatgcccagccaaatacatttacccgagtgatctcttctgaaagaggcagggtattgttttcatttttcaaaagaacagcaccttccgcctcgatctgggctgccagacggcggctgttataggcagcttcctctttcgcctcttttgatacattggtacggctgccggaaagatacaggtcaatggtctcacgaaacgcaaaagccacacctgtaacaaggatcataagggcaagaaaaaaagaggcacctcccaaaaagaagcggtaccggaaagggatcttacctttttctttcaaggtttttgttctttctggatttcggttctttttcataaggtacctcacattattatttttaatattatagatcattaagcggctgttctcccgcctcttctgcccttttcacaggcagctgcaaattctctcagtttttcttttgcctctgctgtcaggttctgcggaacagcgatctggatggtcacatactggtcgccttttaccttcgggtctttcatggaaacaatacctttaccggcaagacggatctttaagccgcatctggttccctcacgcagtttgcaggaaacattgccatacagggtaggtacaatgatctcaccacctaaaactgctgttgtaaagggtacttctgtactggtataaacatccattcccttccgttcataaccaggccgtgttcctacatggacctttaataacagatctcctgcttctgcgccgcctatgccaggattgccttttcctttcaggcggatgctctggccttcgttgatacctgcagggatatggactttcagattttggctctttccatttgcatcggaaagtgtgatcacacggtctgcgccaaaagctgcatcatcaaaactgatattgatctccgcctgtgcatcactgcctttttcgctggatggatctgcgccaaaaccgctatagccatgaaaaccgttaaagccactgccgtcctggtgaaaaccgcctgtaaatcggctctttttaccgccgccgaacatatttccgaaaatatcaccaaagatatcatcgccttctccgccttcaaaatggaaggtgtgtccgtctgaagtatggaaacctctgaagccgccatttccggaaaagcctccaaaacctcctgtaaagctgccgtcagaaccaaagccgccatttgcgccgtaactaccggctcctgctgctccggttccgtcaaaagctgcgtggccaaactggtcatacagtttcttcttttccggatcgcttaaaatatcataagcttcattaacttccttaaatttttcagcagctgcctcatttcccacattgctgtcgggatggtattttttagccagtttacgataggctttcttaatagtggcagggtctgcagttttatctattccaagaacttcgtagtaatctcgtttctgttgtgacatcgttctcatcctttcctgatttcttacaggacctgtgaagatcctctaagttataaatacaagttatatttgtttgttctataatatgtataacacttatatcattcattgtcaaggatggaacgaacatacattttctttatcgttctgctgtttttacactgttgaccacataaattccaaggcatacaaataccagggcaaccaggctctttacggaaaatgcctgggctgtctcccctaataccagggcggacaaaagaacaccgaacaccgggttcataaagccaaatacggtcacgcggcttacagggttatattttaacaatacaccccagagtgtataagcaactgctgagataaatgccagatataataacaggatatacgcggaaactccgctttcaacctggactcttccgccgccgaataatccaatgaggatcaggatcagtccgcctgacataaactgataaccgcttaaggtaactacatcatactggttgccatatttctttaataaggcgccggatgtagcataaaagatctgggcaaacaggacaaatccttctcctaaaagagatacctggaacagatttccttcctgtccggacaggttcattactacaattcccacaaaacccagggcgcatcccaccagttttctggctgtcagtttctcataccggaagatcaggctggcaactaaaatagaaataaaaacatttcctcctgtgatgatcgctccatgtaccccgctggcatgtgccagtcctgtgtaaaagaaataatactgaaggaccgtctgatttaagcaaagttccaggatcgctcttcctgatcccttctgaggcatgatccagcggcgtccctggatgctgtgaaaaaggatcaccagaaaacctgccaacaggaaacgcattcctgcaaataaaataatggacattgcgtcagatgactggatctggaacagtctgtaacctgttttgatcgccggtgtcgcgcttccccataagaaacagcagataccagccaaaaacattactacgggtagactggtcagtctgctgttttgttgctgtgtattcatattcttctccattctgctactgtctgtagctcgtttatccttataagagtaccagtaaacagattgaaagtcaattttttatcaataagttgtgaataagtattgaaattttctcaattttgttttacactatacacaaaatattttaggtgtataaaaatattttgtactgttttgccatgtttgtctatttatatgttttactggggattttatagatcacatggcctggggaaaataaaatatgtgtgaaagaacaggagaatttattatgtcgtttcaatcagtctgtaagcgttattgtctgtttttaacaggagtcatcttatgtgcaacaggaattgcctttatcacccgtgcgggtctggggacttcaccggtttcagggcttcctttcgtgctcagtctggtaacacctgtatcaatgggattttttacctttctgtttaatatgatcttcctgatctgtgaagcactcttaagaaagcgtttcagcgtagaacaggctttgcagatcccgattactttctttttcagtttctgcattgacaaggccatggccatcattcctacccgtttcggcggtccctggggtgactcttttgtctacctggtcatcggatgtatcatcatgtcccttggcatcagctttgaggttattgcagatgtgatcatgcttccggcagaggcatttgttcgcgcccttgctaaaaagaccggctttatattcggaaatgtaaaagtaggttttgacagcacccttaccattctggcaatgatcctggcactgatctgtttccataagttaaacggagtcagagaaggaacactgatcaatgccctggtagttggccagttagtaaaacagtggagacggtgcattgaaaaaccgctgtcaaatgcaattgcataaaatatcaaaaatccctgtccctgtaaatggggatatgtcatgaaacaaacggaacccgccctgccaggcgggtttttgcatattggctacctttttgcaacagaaaaacgcgcccgcaggcgcgtctttcccgattacttttcttctttataacatccagtctttgatcacattgtggtctcttaacagttttccaacgactgtcttatcgatctttctaagcagaggtttcttaagcagttccagtggcagaggcagcttcatttccagcggagattttccgtccatcagctttacagtactgtctaacagatctctcacatcgtatacgcttccccagacctcaggaacaccacggtctacaccgcaaagtccgtatacagcttccattgcagtacgtacagaatactccgtagtgaaaatcgtatctcttggtgtttcagcaaactgacctaagaatgcagcgtttacgcagccatccgggataacgtccggtctgtcccctgcgcttcttggcataaagaaagctgtgatatatggcatcatggtcggagtacagtttgcatggtttgctgccagatcatcgatctcttctgtaggaatacccagatgatacagccactctgctgtgatctccttaccattacactctttcattggcttcttgatataatcgcctggaacatcggtaaacaggctgtatacccatacacagatctcatctttcttctgtgctttaaactgaccctggcggttgatagtccagcttaacagccagctagagtccttgcagcttacaataccgccggtaacaactttaccggttctcggatctctcttacagatcttctggatataggaaatgatcttttcatcagaggttgtaacagttgcagactcccagtttgtctttgcaatgtcagaacagaacttttcaggatgtccaaaggactcgtcctgggctgcaatattcttccacaggctccagcatccactggtgcgaacttctgcatcccctacaggagcatggtcctggtcaccgtagatcgtaccttctgtacagcttccgtttgtgataaataccagatcattttctgttaacgcgatctcgcctttattaccgtcttttacatattcaatggcttttgcagtcttcttttccccttcaatgtcaaaacgcacattggtaacactggttccaaactggatctgtacgcctgctgcttccagatatttctgcattggaaggatcagggactcatactgattgtaacgtgtaaatttcagtgcagagaaatcaggcagaccaccaatatgatggataaaacgctggaaataacgcttcatctccagggcactgtgccagttttcaaaagcaaacatagtgcgccagtacagccagaaatcagagccaaatacttcatcatcaaagaaatcttcaatagacttgtcatacagatcctcatctcttgtaaagaacagcttcatgatctccatactgcccttctggcttaaacggaatttaccgtctgtatgggcatcttcgccacgtttttccgtagcacggcacagagagtagttagggtcatgtttatttaaccagtaatattcatccagtacagaagcattaggtacttccagggaaggaatgctgcggaacagatcccataagcactcaaaatgatcttccatctcacggccaccacgcattacataacctctggttggatcgtcgataccgtcacatgcaccaccggctacgtccatagcctctaaaatatggatattttttccaggcatctgggcgtctcttactaaaaagcaggctgctgccagtgctgccagaccgcttcctactaaataagcgctcttttcttcaattccttccggcttttccggtcttgcaaaagcctcatagttaccattggtataataaatacccttgctgtttttcgcaaacttaccaagttctgtattgcggtagtcactgttttcctcttcttttttactgcggcgctttcctgccataacagctgctgctccaatacctgctgctactgcggatacagctcctgcacgtaaaactttcttgttcatggtttaaacctgcctttctcattctcttattatactttgaatatcgatatttttattattaccatcattttcgttaaatattgctttaatatatagtattgattactacatacactgtattgatagtataactttttgggcaaaatgtcaatatcacagttaccattcccctatgcgctggtttgaaccgtaacaatcaaaaaatactcccagccacaggtatgttctcctgtaatgactgagagtatttttaccaaaactataaaactttatgcaatatgatcataggatcgaactttataaattgattttaaatatccagtgctgcatgatacccctgatatacagcatttgtgatagtagaaacttttctcgcatctccgatcacacggacaaatggcgcaccgtttctgagagcttctacaacatccgttctgcctctctgtccaagggcacagatcacagtctgggctcccaccatcagctcattgccatctttatccctgcagcggacaccatctgcagttacttcttctacgcgacatcctgtatggacatgaacatatttctcaatttcttttaacagcagcggacggtgacgcacattggcatctacagccagttcatcccgcatttcgatcaggtgtacttcttttccttccatacctaaatggatggcacattcacagccggccaggccgccgcccataacagccactttatcagctactctgtcctggtttttatacagctcattgacgatgatcacattttcgcccttaattccagggatcggcggaaccagtggtctggagccaacagcgatgatcagggcatccggtgcctctttttccacatattcaggtgtcacttcgcatcctaaacggatctctacaccgctctgtcttgcaaaacgtgcataggtttctgtcagctggtacatttctttcttaaatggaatggcgatctcactttttaagataccgcccaattcctcttctttttcacataagataacctgatggcttcttctggctgctgtccatgctgcatacagaccgcccgggccgcctcctgctactaaaactttcttctttacaggtgccggctgtacttcgtccccttccatttctcttccgatcaatgggtttacggtacatcttctggtggaagtagctgcacgttctgccatacaggtaaaacagcgcaggcagcggacaatgtcctcatccctgttttccatgacttttcttggaaggaatggatctgccaaaagggcgcgggccatataaactacatctgccttgccggaagcaatgatctcttccatctgtgccgggtcatttaaaccgcccagtgttgcaacaggaatggatacgtgctttttgatctcagctgccagatatacattacatccgtgttccttaaacatagacggatgggtatctccaaaacctctctggtaagtacctgcagatacatggagcaggtcgatcttggactccagctgcatagcgatgcgcacgccttcttccaggtcatagccgccttcaaacagctcagagccgcttaaacggaactcaatagggaatgcaggtcctactgcttcacggactgcgtctaagatctcacttgccagacggcagcggttttccagagaaccgccgtattcatcggttctgtggttaaaatacggggataaaaactggttgatcagccagccatgtccgccgtggatcaggatcatctcaaaacctgcacgttttgcaagacctgctacttttccataggaagctacaatgtccttgatctgctctttgcttaaagacttaacctttacgccatctgcacgtaccgtatcagaagcgccccactggcacatttcatgctgtctggacttatccgtcatataggttcctgcatacataccggaatgggacagttccaggctggctgctgctccgtgacgggaaatggcatctgctgtataggtagctgctgccagggaatttaaaatagtggtatccagatgatatgcatgggaaccgtctgtctccggatggaccatacattcgctgaccgttacagctgctgcgccgcccttggcacgaagctcataaaaggcggtagattttggtccgatacaaccgtcattggtaatatccgttccgcccattggtgcggaaaacatacggttggaaaaggtgcgtcctgcaatggtgatgggactgcaaagatgtggaaatttgtgtgtcataatattttctctccttttttatcaattcacgaactcgcgctatcacgctctactgcctgctatcgcaggcggttcgttcatgaatgacccaagaaaaacaaatgccacctgcggtgtcgcttgtttttcttttgggatcatacaatgtcattcaattcttcttcgatcttctcttcttcctttttatcatctccgtaaataagcacaggaaggaaagaaagacgttttccaatacttcttgcaataaagccaactaaaacggctgccacaatagtaccttcacgtacaccctctaaatgaccggaaaggaggaatgaaagaactgctgcgatcactgccatggaaacatcaaaacagacctttgtaaaaccaaattcagaatggatgcggaataccacggctcttacaaaagactctcccggaagcataactacatctgccagcacttccatatatacgccaacgccaaggaccagacagccgatcagaagtcccaggacttttgaaatataagacaccggatgaacaaatcccagaaggatcatggacatatcaataaagtagccaaatgccatagataccgggatctgcaataaatgttctgccttaaaattctttcccaaaagtaaaaactgaagaaagatcagaagcaaactgaatacaatggtgaagtttcccagagaaaatgggaaattcaggctgagtacataaggaatagaagaaataggggaagttcccagatttcccttggtgatcaggctgacgcccaacgagtttacaaacaggcccactaaaaagataagataccgctttacctgttctgcttttgtacgtttcataattcttgttccctttcctgcttatttttctttatctgctccttttggaacatgtctttttctatggtaacatcatcatataaacatgtcaatatttacatgtttaaaaatacatatatttttctatggcacagaaagaatttgtatgatatactgctgatagcacgaaatatactttcacacttttataatgaagggatttaaaaatatgggaactttaaaatatgccattttgggattgttaaatagaaaaaatatgactggatacgacctgtcaaaggaatttgaaactactctttttgaattctggaatgccaaacacagccagatctatccggaattaaaaagcctttctgaaaatggtctggtccggtacgaggtagagatcacaggaaatgttctggagaaaaaggtttattccattacggaaaagggccgggaagatttttataaatgggaagaaagtttaaatcctttaaagcctgtgccaaaggatgaattccgcctgcagctcttcttttcaggcgcattatccccggaaaaacgaatggcactgctgacagaccagttaaaacaacatgaagaaaaactggcccatctgaaaggaaatatgggaaaattttccagtatcccaccggaagatgaaaatgactttgccgattatctggttcttcatggggctgttttaagggaagaaacaaactgcaaatggttaaaagactgtatcaagttatgcaaaaaaggagtgtagttttcgctacactcctaaatctttatagtccgccggcagaaaacgatgataggtaatatgaaagccctcatctttaaagcagtaataatatctgtcatctccctgtgtaaagtggatgactgtatcaaactccccgcctgtcgtctgttccaccacacttggaaacggctgctgctcaaacagctttttcacctgttccatatccgtttcatgggaagcgatcaggtttaccagctggtggataaattcattttcttttttatgttcatgaacataaatacttgtttcttccggaaggagcagacagaaacggtctttcttgtgggtgatggtcacttctcccagccgctcttttgcaaaatctgtaaatcctgcaagagcctgctgcatttcttctgcatcacaggcagtgccaaacagattatttaacatgcccacagggtaatacaaccggatcacttctttgcgaaatcccagcttcgcctgctcttccataacagaatctttaatatgctcttctaatgcttgataatccattgttttaacctcatctcagattttaacgcccatcttttcagacttcacttatcatagcacattttgatcctgttgtctttatttcccgaccgcaatttatcttatgattattttgcataatgaatttttctcacctgtccaaatggaaccacaccgtctacagcagctgctgcatcgatcactgcattttcattatccaggtcgatcagtttatagcggttatttcccattcccatttccttcatataagaaagctgtcttaagctgtgtctgctttccatacgcccgatcaggtctttgtggtcattttccttcattgcatagatcatatctacacatgcctggtctgctgcaaggatgtctaaggaagctacaatacctacgtcaggagttacaacagggagagctgcaacaccttcgcagtcacaggaaagggacatgttgcgcattacattgataaatgcgatatgctcgccaaaatgatctacaacagacttggtggactctgtgatacgttccatcagttcttcttctgcaatactccacatattgtcagaaccttctactgtatgaatcatagccttaccaatacgtccgtctgcacagccgataccaatattcttgttggatccgccaaaaccgcccattacatggcccttaaagtgagtcagtatcagaagggactcataatttaacagatttctacccacagacatctctgtaaaccactttccgttctttacaggaagcatggcagttccatcttcatccataatatctaccgggcagaaggtccagccatttacctttaaggtctctctatgctgctctgtagtataacggtcgccttcataataagtattggtctcaacgatcactgcgtcatccatcttatctgccatcagttcttttacccatggacgaggaatgatatttgggccattcttttcgccggtgtgcagctttatgccggtcttgccggtaatacgggactggatacggtcatagatcttctttaaaccggcagcagacaggtccctggtgaaatataccacagactcttcccctgttctctgatcgtaagggatatactggtttccatttgttccaggtactggttttacattgctcatgaagtgtttcctcctattatatatacattttttatacataaagtctgtatctggtttaagtatacagcttgaagttgacttcaagtcaataggatttcaaacattcagaaaattctgatattatcaaataaatttcaaactgcactcacaaattccgcactttgcgctctactgtctgcttacgcagacgatttgttcgttaatggtccaagaaaaataaatgccaccttcggtgtcgcttatttttcttttggacacattatatcttaaaatattacagttcaattgctataattgttgattgaaaagttgtctgaaaactcttatagtgtgtgtaacataaatattctaaggagggaattatctatgggtgaaaaaaagaaacaggcttctgcctaccgtgaaccactgatccttattgcctttgttattttaggcgccatcatcggaatggtgatgggagaaaaagcgtcattcctgtatccaattggccagatctggctgaacctgctgtttgtactgctggttccgctgcttttcttctcaatttccagttctatcgctaatatcagcgatacaaagagcgttggaaagctgttgggatttacactggtgatcttcgtagtgactgcagccattgccggaagttttatgtttgtagtattgggcatctttggtgtcgatacttccgttcagttaggcgctggtgatgctactgcacaggcagctgcttccagtatcggtgaccagatcgttaatacttttacagttggtgacttcccggatgtcatttccagaggacatatcctggcactgatcgtatttactgtattctttggtgtcaccgtttcttcccttggtgaaaaaggccgtgaaattgcaaactggttaaacaacatgtccctggtattctacaaaatggtagcgatcttaatgaaagctgctcctttaggtctgatggcttatttcgcaaacctgaccggtacatatggttccgatctgttaaaaagctatggacgtggacttttaatttattatcctactgtttttgtttatttctttgtatttcttggactttatgcatttatcgctgccggtccatggggcgtaaaacattatttcaaagaaatcttaacacctgcactgactgcacttggtacccgttcttctgctgctgcccttccgatgcagctggatgcctgcgataaattaggtgttccaagagttgtaagttccgttgttgtacctgttggtgctacctgccatatggatggtgcctgccttgctactatttacgagatcgtactttgctgcaccttatttggacatccattcagaagcattggtgattatgcctttgcactgaccattgctgtatgtgcttctgttgctgtatcttctgttcccggcggcggtgctgctatggagaccatgctgatctcttcctttggtttccctgttatcgcccttccggtactgatgatgatgacacagctgtttgatgcaggctgtactctgatcaactcctgcggcgatacagttgcttctatgctggtttcccgtttcctgtatggaaaagactggtataagcgagacttaaacgaagaacttgctgaagcagaacagaacaaagaatgatataagaacaaattttaggtctgttcttttaaagacatgaattacgtcagaaaggaccgtttatatgtgttgtaaaaatacgaatgcgaaagaaactcatttcggcgcttgttgtagccggcccgatctttatggtatcataattcccggaaaacatggaaagctccttgctaccttatacacggcagggggtgaaggtccccatcctactatcctccttctccatggtattcccggaagtgaacagaacctggatcttgcacaggcatttagacgggccggctttcacgtaatgacattccactacagcggcagttggggaagtagcggaaattattccctgcaaaatgatctggatgacgctgaaacagttcttgattttattttaaacgacacaacttatggctttgataaagataagatctatgcagcaggccacagcctgggcggttttgtctgcggacagaccgctgcaagaagaccggagatcaaaggtgctgttcttttaatgccctgtaatgtaggacggatcggaaagatcgcccaaagtgaccctgaaaacgcaaaagtcctggaagatgtattaaatgacagtgtaaactggctgacaggccttacaaaaggatgcctttacaaagaggctaccgagcatgagaaagaatatgccttagaatatcaggctgctgctctttccaaaaagccgttattatgtatcaccggatcactggatatctgtacaccgaaaaaagatcatttacagcctttattagacgggattgatgccctgggcggtggaaatatccaggttcttgaatatcctacggatcacttcttctcagattaccgcctggaggtttctgatgttgtaacagagttttttaaagatctggcaaaataatatgatttctttatggttccccgctgatacgcagcggggaattttctgtttctgctctcctgctgtcgcctgaagtacttctcttccctttttgacatctttttgacatttttcctctcccatgctaaaatacccatatactttgccaaaggggaaatgcagatgaaaacagtaaatggcgcgtctttatatgcacctgccgtctatggaccggcaggacgtattttgtgtaccgtgtatacggcggaaggaaacggcccgcaccctgttcttatcttcacccatggctatccgggacatgagaaaaatctggatctggcacagtctttacgcaggaccggcttctcttctgttatcttcttctatcgtggttgttggggaagtgaaggtgatttttcctttgagggaagttttgaagacacaaaagccgtcctggattttgtattaaatgatacccagtatggttttgacaaaaaccacattttctttatcggtcacagtttaggctgtgttaatgcggcccgtatgatcgccctttgtcctcaggtaaaaggcggtgtattcttagccccctgcgatctgtggcgtatctatcttcttggacttgaaaatgaggattacagagaacacttaaatgatctgttagaagaagggattccttatatccacggtacagatgaagaaactctcaccaacgaaataaaaggcagtgccggacggctttccattggctcctgtcttcaggctatctctggaaaatccattctctggatcagcagtccggatgatgaggtagtttctgaagcagaagaaacctatccctatataaagaaaataaaacatttttccccttcctgttttaaatggctgcgtgtctcttcggaccattatttttctaatatgcgttcccagcttacagaagacattgccagctttttactggaaaatacggatcataaaaaagcacatattgaccaggcttcttttgaagtccagctgcgcaagctgatctgtcagcagttagcaggaattactctgcctgatgttgccgcttattttcacatcagcattccctatgccagcgacctgatccgccagatcacaggaagcaattttacagccctggttttagaagaacggatgcgtgaatcggaaaaactgctgaaaaacagcaatgttcccgtttccaaagtagcgctgctttccggctatcaggaaccttcttattttatgaaagtgtttaaaaaatactttggatgtactcccagccagtaccgggacagccagaaataaacaaaaacacatacctgagagactttcccatcccgctggtatgtgttttttatctcacattttcatttcatgttcttaattactctctgcacacgctgtagtccagccattcaaagtctgcctggatcccatccccatgaagatcctgacaggtcacaccgaccatagctccggcaaatccatttccgtccacccgttcatctgaaaggtttctcatatcaagtacctctcctacctgggtataggaaattccgtcctgggaaacgaaaaaggttacattccgctctcttacttctgcttttaagtataccggatctttattttctcccagatatactttttcactctgggagatctctttattcacagaaacatttaccattacataaggttttccttcatcgtctacagacatgttcagatagtaattattgtcataattgtaatagcatacaagtccggccatatgacagtaatctcttggagcaaattccattttcgctgtaaaatcataggaatgatgctggtgtctgcggactaataatccctggttatatttggaagccagggaatttccaccctgaatgtgcagctttccgtcagaaatggtgatgccgcaggtcttagcactctgccgcaatgtcatatactccaacgggatctctgtaacttttccaaaatctgtaaatccggactttgcagattttacttccacctcttccggcacctcaaagaaatcttccggagatgcggtatcatttgcagacagcttaaaccagccgtcttctgtaagagtcatgttctggatggctgtttcacggccaacaatactgcagtcatccagacttctggagcagagatgagccatataccagtttccatcttttccctggataatctggccatgtccggcacgctttaactgtacatcttttccaaaagatgtaaggaccggcgcataagggctgatctcataaggaccagtcagtttcctggaacggcacatggtcacgcagtgtttaaattctgtgcctccttctgctgttaccagataataccagccattatgatagaaaatgttcggaccttctgtggttcccttatcgctgcccttaaatacattatagatcggtcctaccagcttttgggtctttggatcgtactgctgtacacctacgccgccaaaacgtttgtgatccaatctgtaatcaaaaagcatgttcaccagccacttggtaccatcaggatcatgaaagagagagggatcaaagcccattttattgagagggatggggtctgaccatggaccctgaggatctgtggcagttaccataaaattgtgggtatctttaaaacgatggcggttagtatatacaatggtatagatcagataaaaagtaccattatcgtaagtaaggtttggcgcccagatgccgcaggcagtgtccattccctttatgtcaaatttagtctcatctgtaagagcataggaaaggatctcccagtttaccagatcttttgaatgatggatacagatgcccggaaaccattcaaatgtagatgtagcaatataataatcatctcccactctcaccagggatggatccggattaaaaccgggaagtacaggatttattactttcatgttttgcttctccttttcatgctcattttcttaaacttttttactaatacatcaaccctttaaaccgctggttgcaataccttctacgaaatatctctgtgctgcaaagaacagcaggataacaggaacaactgctacgaaagccattgccattaccttgccccactgtacaacagactccgcatccagtgacatacgaagtgccagagagattgggaacttcttaacagagttgataaataccagtgagttaaagtaatcattgtaggtccataagaactggaacagacctgcagagaataatgacggcttcatcagaggcagtaaaatatgggtaaaggtcttgaaggttccgcagccgtcaatgtatgcggactcatccagatctcttggcagtcctctcaagaactggatcaacatataagggaagaaagcattacagcataacagcgcaggtgcgtaaaatggcatgtacgtattgatccagttaaacttgttgtataaagtataacgaggaatgatgactacggagtttggcagcatcaacattgcaataagcagtacaaacaggatcttctttccaggaaactgaaatctggcaaatccatatgcaaccagagcactggacataacagtaaagatggtagtcgggatcaccagtaaaaaggtgttgataaagaaattggtgtaagttgccttaccactgcccttccagccatcaataaaatatttaaagctgaaattctgaggcagtaaacggatggaaccaaagatctcgtcattggacttaaaggatgcaaataacatccagatgatcggatacagtaaaacggcaccgatcacaaatatgatcagatagtcacgaaccagtttagcggttctgtgttttgactgtttcataataatttacctccttttattcatcggcataatgtacccacagcttggaagatgcgaagatcgccagggtaaagatcatgattgctgcaaatacgacccatgaaatagcacttgcgtatcccattttaaaataggagaaaccttctttgtacagtttcagtcccagtacataagtggactttaacggtccgccttctgtaatgacctgtgcggaagtaaagttctgcagtgcctggatggtctggttgatcaggttgaagaaaatgatcggggaaatctgtggcagtgtaatatggaagaaacgtgttacttttccggcgccgtcgatctctgctgcttcgtaaagggagcgtggaacctgctttaatgctgccaagaacatgaccatggaagaaccaaactgccatatctccagcatacatatagtccgcagtgcatagcgtgtatcacctaaccactggatcaccggcagatgaagggcgcttaaaatagcgttgatcacaccattgtccaggaacatcagtctccataacagtgctactgctacacttccgccaaaaagagacggaatatagtataaagtacggatcaggttgataccttttaaatctctgtttaagaacatggcaactgctaaggccatgatcagttttccaggaactgtatacagcgcaaaaaggatcgttacttttaaagaattccagaattccttatcctgggtaaataactttttgtagtttgcaagaccctggaaggttgcctttgcaccaacagtataatctgtaaaagaataaataaaagatgaaacaaaaggataaagctgaagaatggcaaagcctaagatccagggaaggatatacaggtatgcctgatattcccttttcatggtttttttcctgttcataatgacctcctataggcagaaaaagagcgccgcaaaatactttcgtgtcctttttgcggcactctctgtttatgatcaaatgcttattactgctccagaccagacagcaggttgatggtatcagctgcagcttcctctggggtgcttgcgccgtaaccaatggtctctactgagtcaaaaagaatggtcttggactcctgggaagaagaaatcttatcatttggagttccgcccatagctgctgcaatatcagcaccttccatggtgatctcacttaaaattcccttgtcagagcagatctttcttgctttctctgttggaggaacgcttcttgttgcccctaaggtctctaatgcagtatcatcattgtagaagtaattcataaactctactgctgcttccggatgctcacaggtctttgtaatagcgattacctgaggagtattggatgcccagcccttttcagtagcgccgtctaatactggaagctgtcccatcatgtagtttgcttccggatttgctgcaaccataacatcaatagtagagatgtaagttggagctgctacatacttgccggcgatccagttggtatcagactgcaggttgtcacctgtgtaagatgcctgataggaagcaggtgcaactacttcttcatcatacagctgctttacatattcatataccgtcttaagatcatcttctgttaagttcagtgtctttgtgtctgcgtcaaagaaggtctttccaagaagctgttttccatagttgaatacaaccatgtttacaagatattctttgtttgcgcacagcagatacatgctgtcgtcatattcacggactttcttacccatgtcgatcagatcgctccaggtatatggctgggagaaatcaataccaatggcatctgccaggtctttgtttaccagcataccggaaccggaaataccagttggaagtcctaactgctttccatcatagcgtccgttgatctccagggaaatgtaattctcatcgaagtttgaaagatccatatcgtaatctttgtaatcgatgaagtagtcacctgtagatacataagttgggaacacttccgggtctacctgaacaatgtctgctgctgttccggatgccagctgggttgccagtttatcatggtaaccatcgctgccgccgtactcagcttcaatggtgatgtttggatgagctgcctcaaactgctcgatcacctttaaggtagcctcatttctttcatcaccgccccaccatgcaaaacgaagagtgatgttttcatcagagttgccgcctttgcctgttgtctctccaccagcagcggcctgtgtgttgtctcctgaggatgaacttccacatcctgccagagtacctgctgctaatgcagctaccaatgctacactcacaaatctttttttcataaccgtatccctctcttttctttcatttgatgatcttattgtagtaaatttttcctaaaaccgaaaggaaccggctttttcatttttattcattttttaccgtttttttgcaaaaggtatcatttcttttgatttttattcattctttgtttttaaatttctgctttcagatctgtctgttccggtcggacagcactttccggcaggcaaaattccattacacagcccattccctttttgctgcggatccggatcccggactcatccccaaaatgaagctttaaacggctgtttacatttgcaaggccgatgtgatggacattgatctccttcatggagtctctgagacgtttggtttctgccttgtccattcccaccccattgtcaaccacacggaaatagaccttgccgccgcggcagaagatctggactttaatataacccctgtcttctttataacgcacaccatgtaaaatactgttttctactaatggctggagcatcagacggaacacccgcagatccatcagttcctcatctacctcataatagatgataaatttctccccaaaacggaatttctggatcgccacatatttctttaaatacagcaattcttccctgaggctgatcgtttctgtggcatctgccagtgcgtattttaaaatatccgataaatattccaggatcgtcactgactcttccgaagaagcaccggactgtacctgaaattgaagggtctgtaaggtattaaagagaaaatgcggattgatctgtaactgaagggctgtcagttctgccacttcctgattatggcgtttctctgtcagctctgtctgcagctttactgtgtttaaaaacagatagatgatattattcataagaatatcatactcatcttttacttcctggcggggtccggaaggataaactccgctttccgcatcataaaatacctggatcatatactcgatctggcggaaggtacgtacagtggtagtataggctaatgccatcatggcaatggtatttaacacaaatactgccaggaaagcccctgccacctggatgatattgttcattttcgcctgcctggagatcagggacacaaggagaaggtcatactgatcattgacagccgtatggaccagataggattttccattgatctttttccagctgttttcctgtccgctgtttttaaactctgtaccgctaaaactgtctgctgccccgttttcatcattccaggcaaggatcagctggtcttttttatccagataaagaaccgtttcattgtctttttgcaggatcgcgtccagacttgccagataagcgcctacatcaatattcatgaccactacgcctttttgcagcttcattttctggtaaatggtgatcatgctgcgcccataacctgtatctgccgctgccctggtctccatcagactttcttcgtccgatctcatggaacggtaactgctgtaccagttgttctttcctttaggctgcagctgctccagtccataatctgaagaaaaatagttgttatacccatccagatacagataaaccgactggatatatgggtaagcccgtataatactgcttaacgtggatttaatatttcgcagatagatcgcgtcactgtaagggatcctggtctccctcttcatcagtcgttttaacgcgatcaacgtataagcattattggtcagctgttcattttgatacgctacattgctgaccatcatctccagactgttatttacactggaaagagtattctttgccctggcatctaaggaccggtccagctgataattaaaggagatcatggcaaaggaaaagatcaggatggtaggcaccattaaaagcatgagataccgaagaaaacggcgtataaaaaattttcgtttcatcccttttcaagcacctttccgtttctgtattccttgggagtcattccaaaataggccttaaaagccctggaaaagttcttgggattatcatagccgatataataagcaatatcataacttttatattgaatgtcccctaacagctcacaggctttttccattcttgttttggtaagataatcagaaaatcccataccgcatttttccttgaaaatacgggacagataactggggcttaaagacacctggactgccgcatcttccagagaagcctctttataattttcttttatgtactcttttactttggagatcacctggtcgtaataagttaccggtgtttcctgggtaactgcgtatttctcatctaactgctgccgtatttttccaaagcaatttaaaatatcaccgcttttgatgggctttaacagataatcttctacccggtactggatggcataccggaaatactcataattctggtggctgctgataaatacgatcttgatgtcactgtcctgaagctgtttacaaagctctaacccgttcatctccggcatttcaatatcactcataagtacatggacctgatgggtctttacgtattccaatgcctttaaaggcctgctgaaccacgttacctgaaatcctaactgttcccatggaaacagatttgctattccttctacgatcttatcctcatcatctacgatcaccagctgatacatatttttcctccctttatccctgatgtactcccaaattgctttattttaagaatacatcttgcttgtaaatccatttacagcaaaaaggaaccggtcctgacaaccagggaccggtgtaaaactttcctgatatttaattatgccatacaaaaactgaaaatacaatgattactccaataaccgttttaacacttttccactttcatttacaggaagtgtatcctcaaaaaagaaaaactttgggatctcaccctgggaaaggattgtttttaactgactgcggatctctcccgtctttttttccagatcttttcccctttctttctcttttggcacgatccaggcagccagatactgccgtccctgtcgctctaccggttttactgctgcctctgccccgatccccagtgaaaggatcgcctgttctacacggatacaggagatcttctggccattgatgctgcaaatatcatcctttctgccatcaaaacaaaaataaccttcctcatccaaatgggcataatctcctgcacttgcttcttttcttgttccgatcacaccccatttcgtatttaccataagccttccgtcttccagctgcacatcaattcccggaaacggccttccgatcctggtcttatcgtcattcatctgtgtatcacggatataggtaacatagcttaactcactggcaccataataaagcgtgatctctgcctctgtaaaaaactgttttaactgtgctacctcttcttttccaaggctctgagaaccgcttaagatggtccggatctctggcagaggagcctgtttttcatggcataatgcctgatataatgcccgcagttttgccgggatcaggtagataccatttgcctgccactgttttatattccggatccacagccttggatcaaaacgctcctgggccaaaatagttgctcctgccgctaattgccccatatacaggtttaaatttcctgtaaatgcaagacttccctgcataaacaggcggctttctgaatttatatgaaaaatctcattctgcacaggaaaataatcataccagcttccaaagttcctgaaaagcagcttattttttcctgatgtccctgaagtcataactgccatacaggcattttcaggccatgttttttgggtccattcatccaccggcactgtggcatctgcaggaaggatcaccgggatccagtctgttccctgacaggccagaaattccaccagctggtctaaaatacaggttgtctggatgatccgaagctgctttttggcgttctgttccggaaatttctttttctcctgttttagcattccctgcttttcttttgccaaagcataaagctggctgtatgtaagacttctgcctgttgtacaaaaagcctctttttccggggttatatcctggatctgctgtatcagttccagatagttggtgatcttttccatggattttatctccgcaatatacgtttctttatactttttccaccagaagggccgttccgatcccgcctgctgccgctactccgcagatgccaaatcttccctggttcagttccagatcctttaacagatgtaacaggataatggctccggaagcgccgtaaggatgaccgtaagcaagggctcctcccaatggatttaaccgctctcttattccagggaactcccgctctaaaagtacatcgattactgcaaaggcttcattcacttccagactgtggatctcatctatagaaagagcggtttgttttaacagcttgcggatcgccagaacggctgttttaggactcataaaaggatcactgccaatagctgtgccgaaacggaacgctgcctgaggcgtcagaccatgtttttttctgtatgcttcagaacagaggaccacaaaagctgccccgtcatgcatcagacatgcattggcagctgttataatcgaaccgcctggcagtaaacagggaagccggtctaagagtctctggctcatggaaggtctgatcccttcatcttttttgctgtctgcaatggaaaactggatatcagataaaatcccttcttttgccgcctgggcagctcttttatggcttaacagtacccagggatccatttctgctttggtgacattttctgtaagagctgttttttctgctccctctagcatgacctgctctccctgaatgtcaggaataaattttgccactgtatagctttttccttcctgatagtccggatgattggaattccacatgcggaccggctgggtggaggaactttcaaaacctcctgcgatcaccagatctgccagaccactttcaatcttcgctgctgcagcagtaatactttccagggcggaaccgcactgaagatctaaagtaactgccggtatcatttcatccaaaccggctgtaagcgcagcaaggcgggtgatatttcccccgcctgctactgcgtttccgccaatgatataatcgatctcttcatcttttaacaaaaatctgttttttatctcttttaagacctgggcacccagaacttccgccggtatatgccggtatatcccgtcttttacaccaataaaacttctaagtcctccaaggatccatacattttccattgtctgctctcccttatctatctaatacccaggtcttttttgaacattttagtctgttggaaacagtctgcgaagaggttttgcaattcctgctgctgcaaaacatttaacaaaatcaagaggaataaaaggaagcactgcctggatcataatagcgccccatggctgattggtcacatacttcatctgaactgcaccaaataagtagattaccggaattcctacgataatgataaatgcagtctgccatcttactttctttactttacagcagaacatggagatcagaacagctgccaccaggttgccataacggtatccgcctgccggtcctaacagttttcccaaagatccgccaattcccacaacacttaacaggatccatgtaaccataactgccagagtctgtaacggagaaaggagcagaccgatcaggtttaccattaaagtctgggctgtaatactggctgttgaaaagggaagcggtattttaatatacgttgaaacaataagaagtgctgtcattaaagccataatcgtaaggcttcgtatattccaaatactgtaagatttcgttgtgtgaactgtttttgatgcggtctgactcatagctgtccgctcctttctactctttgtactctgtaatttcagcttttaaaataatattttgaggcgtcctcagatggattttctgtaccttttttaatgccttttccgcttctatcttcggatcattttcttcatctgaagataaaaattcaagccacccggatctttcaatctgcaggggggtaagaaaacggaactctgcctgaaaagggatttggggtgataactgttttaagatcttattcgccatcagaaaacccggaacaatagcaccttccccctgatgaatgggattttggtcctttacttcccttaaatagcgatctgtctcctccctggtgaccttaaagagatgatcttctttttctgtttccatgttttccctgctccccaaagccattttctgacccgggttgatcaaagtcacatctaaaagatctttttcctctcctgcaaaagaacaaatgtggatctttgccagcctcccatccttttttaatatctgcaaagtaaactggtctgaagttttcattttcctgtttccaagactaatcctgcactttgcgatcatccagccctgacagtcaggaagggttgaaaggagaccttctaatacaagcaaacgctttgtatactccattgcagctatattgtcctttccttatattctttatatcttttacataacctgtttccgaaaacgctttgagtatagcaaaaagaaaagataatgtcaaccagttatcgcaaatggttaacattatcttcagcttattaacaatcatatctcatttttacagatcccctgctttttcaattaccttacacgggcttttgcagtataagactctacatccaccttgattaccgtcacagcatctgccattttctcgctgatcctatgttcttctccagtctgcagtcaatttctacaaaaacatgatcattttttcgcaggcaatccagtttatgcccttccttcgctccatggacataaaatgtcagttttccatctttcatttcatatccataatgaaggggcacaacatagggataattttcatcaaacattcccaaatgcatgtaacgtgcacctgcaataatgctttcaattttatccagatctaagatctctctgtcttttcttctcattaccaaattacctccgtatacataacagaaactctatcattttatcttaaagggattgcagaatttcaactgctcttctgatttctgtctcatccgtgcgatagatctgaaattcgctcaattctttaagtcccatatgtacccgctcatttcgataatgcatgccgcttaaacaaagctttttaccagacatatgaaaagcgtgtgctcctgttatcttagcaatttctgctatattcgctgaactgacccctgcgccagccagtatggcaggtttgcagtagctgtctatgccctcacacttatcagcagaaagctgtacaagcctgcgaagaagttcacatccggcaacacagtctgcctcctgccctgatgtcaggatcgtatctactcccagctctgctgctctttgcaatgtgacaaccgggtctgcgcatacatcaaacgcacgatgtaacgtgatcccactgtttcctgctgcctcgatcatcccacgcatctgttcttcattgagagtaccatcttcctttaaacttccgatcaccactccatcagcaccggtctgcgcaaaatagcggatatcataaagcatctgctcatactcatagtgtgagtataaaaaatcaccaaatcttggacgtattaatactctgacaggaagtcctgttttctctttgacctgttcaaataaagtgtagcccggcgtggtcccaccgatcacaaggtttgcgcataattccaggcgggttgcaccgcccctttttgccgccaacgctgactctacgctgtctacacacacctctaaaatataattctccatctgtggttcctcttgatcatacaaacatttatttcatggatcaatcatttatttgtcttctccgcaaacatcgatctggcagcttttcattgtctctaatgcagctttatgcttttctggtgtcactccggcacagcagctggcatctacagagattgcagcctccggatactttgctttcaggatcagggcattggatacaacacagatatctgtacatacaccgatcagttccagttcatctttttcatcaaatccgttccagttcagccagccaaacgtgggtttatctatgtattcacaatttcctgtttccagtccgggaacgatctgccatccatcggtacccttaatacaatgctttaccggcagcttctttccctctggtgtatccagataattctccccgtgggtatctcttgtaaaaatgatcctgtctccgcgatctgcatactctttaatcttagctttaacattcggtacgatcatctgtgcatctttatttcccagtgatccagtcacaaaatcattctgcatatcaattacgatcagtacgttactcatattgtctgtctccattccgttttttctctttattataccacgactactttcatataagacaatctttttgaaaacctatatttccatcgataaacggagcaaaaaagccagaaaagaatactattccagccaaagagctacttggggacaggtaaatccggcaacttgcataatgccaagtaataaagcatataaccgccaaaagagtaagcaggaatgtaacagttttttgcaaatggcaaggactgggacctctgcccaaagcagccacgattgtagatgtaacggatgagcctttccggaaatgatactctgattgaaaaaagagcctctggatcctttgctttcaagatcagggcattggacacaacacagatatctgtacatacaccaaccaattcatttcatcatctgtagcaaatctatccccgttcatccagctaaacgtcagcttatttatcaatctatgatcatatatcctaaagctttaagaacatccaatgctttttgataattttctcttttcattaaaacataatccgtattatatgtagacactgcaaaaattgaaataccattatctgccagggctgccgcaatcttagccaatattcctattaatgagaaatccaaaacgccctggatacgaaacgctttccatccatcatcccgctggatcacatttgccggaacttcatctgtgatacatacaagagacttctcttcgtccgtctttccaataaaactatattccgaattcaaatttacaagggaataatcctccacctgacataccgaaaaattatgatcgatcttttttatttccatcataaatattatctccttgtgtaatcaatttcacatcggtgttctaacttcgatcagatgaccatccaggtcataaaagcgaacaacctgatgcccacagctgtgggtcataagtttattgacatactggatagacggatacagacgctctaatttttctgcaaatgttttaagatccttttcttcaaaatataattcagaagaattgtgttccgatactatctcttttttcaaaaaattggcccagatcttttcatcctgaagaacaagcccttctgttaagatcacatttccgtcctgatcaagaattacatccaggccaaataaatcatgataaaatgtttttgctttttcaaggtctttcacaacgattaaaatattttttaatttcatagattatccatttcttcctttttcattttctgtatttgacacccatgcaaatgcttttgcaactctcaaagtcggatctttaaaatgaccaccctgattccattctaaagtgcattgtatttcttcggcctgcatccatgcatataattcccgaatacagtctcctacttttgacataactgaattttttgttttttcttccttattgccaaggctgagataaacagaccgactttttattttacgttctttcagatattcaacaaatccagggaaccaaaccgaaggggatgctgctgcaacaccataaaatatatccgtttgacacgatgcccataatgcaaaaagcccggaaagagaataacctccaatgtagtatgtcttgttcttatccgtacagatctttaagagtttttccagagtttgccaagccccatcaccaaagctttcgtttccaaatacagccggtgctttccatggagttagttcctggtaccagttattaacctttacaacgataaatcgaaaatccttatttataaggtttctgatttctgtaatctcattttcaatgtcatgcagatcatgatcacctactagctgaattaaaacaacatccgccgttggatttccgtattcatatatcgtcatccgattatcaagaaatttattcataatctgcctcacaacttttcaaatatactcaaataccgcaccggtacctcttttgtcagccatactacattcaccgacaaataaaacagataaccatctgctcctatctttcctgcattcatctgatatacaaccgatttttcatgtcggctcccaactatttttgcagtctcatagtcttttgacagatgcacatacaatctggattgccgaaatataatttagcattatcaagagcaattaatccctctgccattgttagacatttctgatcttcttcaaactcataaatgctccgctctgtttcaattcgaatcttcccatcctgaatttgcagtttaccgcacgatgagtgcatgtattcatctgacggcaaaaagaaatagactgcgtatttgccaggcttactgtccgattgaaaaatcatgataagacctgactgatctacatagtattcccgccagtctttatatggctttccatctctgttgcttgcaactcgcataattcctgtatatgtttcttctagatgcattatcttgtctctccttttcctttaagtatagcacatatcacttcctttacgaataaactaacagttgaaaacacatttcattttcaaagctatccctcatattctgaacatcaaaatatcaaggaggacaaaaattaaagaaaaatctataaaatagtataacacaaaataagagtgacatggtgaactgattgaaatgcttctgatttttgtaacgaatgattgaatgataaggagagattcgatacgatgagaacaatatttgcagaatacaatccacaacgaaacagcattgatgtatataccagtgctggctatatgctccgcattgactgttaggaagctgaaaagaatttaataactactcccggatcagaacgtgcattaacgtctcttgctgtcgatgaaccacttgaatatgtaaaattatatcttgatgggaatttacagatgtgggtagatgcagaagattcacgctgctaatattagcctctactttgtaaccttagttccgccgaacacctccgacataggaattctttcaagcatatcatctgtttttttcacttcttctggtgtcaataaaatatcagatgcacccgcattttctttcaaacgttccagttttcttgtccccggaatcggaacaagatatggctttttatcaaccaaccatgccagagaaatctgggcaactgtcgcattcttttcttctgcaaatgcctgtatccacgctaaaaactcctgatttttctcgtaagaatctttttggaattgcggcataattgaacggtagtctatatttttctcaaaaacagattgtgcattgtatttaccagacaaaaatccatttgccagtggtgaaaacgccacaaatcctatatttaattcttccagtaccgggaataatttttcatgccatctcgccatcatggaatagcggttttgtattgctgttaccgggcagactatatccactgcctgtgcaatcagatttatcatttccgtcttatctaccgatgcaccatacgcatggttcattcccatgcatccaagtcctattgcggaaactttcaggtctgttcctaaaatcttttttctcatttttttaacttatacatcctgactatttttctgcatatattgcttcacatatttttcctattttttctttatagttccccgtatgaattggaggcatctattcccgtgatttaaaatcatccataaccagtggaatcattttttcagtaaattcccgacaattatcgcaatatcctttttctgcaaatattttctgcaatgtatccaaaccaagttcctgacaaaatacatgaattgcatttgcaactgcatcagcatcttttagtgcatctccggtaacatttattcccatgatttctgccattttttgaatatttttctgagcataaagtgcaaaatgacgaaccactgtaggaagcaccatcgcacaggcatttccatgtgtaatatgatataaagaaccaattgcatgggcaaccgcatgtccatttggaactccgccattcgccagtgcattgtgtgcagcccatgacatttgttctcttgcttccagattctcaggttcttttactgcgacaggcagccatctccatattttattcaagcaaagaaacagaatctgatttgtatattcattattagcagttcctacaagaatttctattgtatgtgctaaagcatctattccaccacatactgttgcagccgcaggcatacatcacagtgaataccctcaacagaaagagcttttattacattttgggtaatagaatgtctgacaacgtgatgtcctgtaacaagcagacatttttttatctcatatttctttaacagtccgcttactttttgtgcggatttactcccaaatataatctgatgtggtataaaaaaagatgacaccccattctcaaggatttgagatataatcaagaggataaggagagtggacaaaatggcaggaaacagacaatatgaccatgaatacaaagtacaggcggtgaaacagaacagtacgtaaacagccatctggagtatgcaggatgttcgcaaacgatatttactgagaaagcacttgatgagatctatcgcatttcaaccggtatcccaagaatgatcaaccgtgtttgcgaaaagacgctcatgtatgcttttcaaaagcaaaaccgcctgattgatgattacatggtgaaatatgttgcagatcatgaactcatcaacgggtaggttctggccggggcatgtgccccggcttccagtaacagatggaagacaataacaagagcaggtcagtgacaagagaagaaatcgaaaaactcaccttcaaaaccactacacaacttctacacaaccaatacacaatttcaaatatttacccgcaatattccctgctaacttgtgatatttaatctataacacatataacaatagaataaacaaagaaaaagtccggaaacccgcattcctgcgcagttttcggacttatatcattcattatcagtctataccatgatgtcaatttttaaaagaagtttcatgcaactgtcagattatttacccatttgctttgcaacttcttctgcaaagttctcttcttttttctccatgccttcgccggtctcgaaacgaacgaacttcttgattgtgatgtttgcgttgttagccttagctacggaagcaacgtactgggatacgctctgcttgccatcttctgccttaacgtaaacctgatccatcagacagaattcttttaattctttgttaatacgtccctgaatcatgccctggataactttctctggcttggaagcttccttaggatcgttctggatctgagcgatcaggattgctttctcatgctcgatgaattccgggctaacttcgtcacggtttgtaaaggttggctttaatgcagctgcctgcattgctacgtttctagccatttccttaacagcgtcattgataacatcagtttcaacgtcaactaaaacaccgatctttccgcctgcatggatgtaggaagcaacaaaaccattctcttctgttactttctcaaaacggcggatgttcatgttctcaccgatgatagagatctgggaagacagagcctcttttacagtcagagtagtgtcttttgcccacttttcagccatgaagctgtccatatcagctgcagaagaagccagtgcctgagcagctacatctgctacgtatgcctggaacttagcgttcttagcaacgaagtctgtttcagcatttacttctactactacagcagtcttctcatcagcggacattgcagtatcaacgataccctcagctgcaatacgtccagccttcttagctgcacctgcaagtcctttttctcttaagaactctacagccttttccatatcaccgtcagtagctgcaagagccttcttgcagtccatcattccggcaccggttgtttctcttaactcttttaccattgctgcggttactgccattttgtcatcctccaaatattaatttaaagttttttgattacgcttctgtgctctctgctgcgaaatcagctggaacttcgatctccattgcgccttctaaaacttcaccctgctttgcttcgataacagcgtcagccatcttggaaacgatcagcttaacggctctgatagcgtcatcgttgcctgggatcacataatcaagttcttctggatcacagttggtatctacgataccgatcagcggaatgcccagagtatgagcttcctgtacgcagatgtgctctttcttaggatctacgatgaagattgcgtctgggagcttcttcatatccttgataccgcccaggttcttctctaacttatcccattctttctttaactcgataacttccttcttaggaagaacatcgaaagtaccgtcctgagacatagcctcgatctctttcagtcttgcaatacggctctggatggtcttgaagttggtcagcataccacctaaccatctctcgtttacatagtacataccgcaacgctctgcttcagtcttgatagcttcctgagcctgcttcttggtacctacgaacagaatgtttccgccctcagctgcgatgtcagatacagccttgtaagcctcatctactttacctacagacttctgtaagtcgatgatgtagatgccatttctctctgtgtagatgtatggagccatcttagggttccatcttcttgtctggtgaccgaagtgtacaccagcttccagtaactgcttcattgaaataacgctcatgttctttacctccgtttggtttttagccggtttattgagcttaaaccggtcgcatccgcctgcttctcatgcttcccggaagacctgttttacaggcacctttccgtagaatccacagacgtgttttttatcaactgtgtaactataacataaaaaaggacagtctgcaagtgttttttgcaaactatccttatattttattctgattattctgtttttactgatctgaaatatttttaacttatttcaaattggaattagaagccttgatcgcctttaattcgtcaaataccacgtcattcagaaccttaatgtaggttcccttcataccggaagaacgtgactcaataacacctgcgctttcaaatttgcgcagtgcattgacaataacggagcgggtaatccctacacggtcagcaatcttgcttgcaaccaggatgccctcatttccatccagttcttcaaaaatatggatgatggcttccagttcagagaaagaaagtgtgctgatagcagatttaacgatctgtaccttacgtgtctcttctgcattctcttcatttacagaacgcatcatctccaggcctacaactgtagtaccatattcacttaagataatgtcatcgatatcatactggctgtctgatttgtaaataaataatgttcccagtctctcacctgcaatgtcgataggtgtaatgatcgcctggtattttttaacattctcttctgcaaatccaagagttgccaggtttacattttcctttgtagacaatacactgagcagacgttcattcaacattttatctacataaccgcccacctgatcttcgatcagctcctcaatctcatccaccccaggccagatacttacaccaagtactttgcccttcttgctgataacaaggatattggataacaaaatttcacttaacactttgcagatgtcattgaaaacaactttatgggaattgttgttatgcaatagcttgttgatttttcttgttttgtccaacaactgaacgctcatgactgaaaccctccttatctctaatgtacgttccacaaatatgctttactaataattgaattttagcacaatttttgtccaataacaatagttttttgaagatttcatgtttttccgaaaacaagaagaaaaaatttatttctgctcttccgccggtttatccatacggtatccgcaggtttcatttgcacagagaagcttatttcccttctctaccatataagaaccgcacttcggacacttttcagtggaaggcttctgccaggacataaaatcacagtccggatttgcctcgcagccatagtacagacgacctttcttggtcttcttgcgcactacttcttttccgcatttaggacaaggtacaccaatcttttccagatatggttttgtgtttttgcattccggaaatccggggcatgcaaggaattttccatgaggaccgtattttactaccatgttgcggccacacagatcacatacctcatctgtcacctcatcttcgatctttacagactccagttccttctgggcaatatttactgcctcatccagatccggatagaagttacggataatagtcttccatgcaactgtaccatctgcaacacggtctaacagtgtttccatgtttgcagtaaaacttaagtccacgatacttgggaaggactttttcataatacggtttacgacctctcccagttctgttacataaaggtttttattttcctttgccacataacgtcttgcaataatggtagtgatcgtaggtgcataggtacttggacgtccgatcccctgctcttccattgcctttactaaagatgcctctgtataatgtgcaggtggctgtgtaaagtgctggcttggctgaagatctgccagttttaactccattccgctttcaatggctccgatcacctgttttttctcttcttcatcatcagaagctacataaacagacatgaaaccgtcaaaggaaagacgggatgcagaagttgtaaacatatgttttccggcacggatctttacagaagtagtctcatatacagcaggagccatacggctggctgtaaaacgcttccagatcagctgatacagacggaaaagatctcttggaagagactcctttaccataaccggtgtcagtgtaatgtcagtaggacggatggcttcatgtgcatcctggatctttcctgtattctttgcagaagcttctcctgctgctgcgtaattttcgccataatgttctttcacaaaagaacgtgctgctgcatctgcctcatctgctacacgggtagaatctgtacgcagataggtgatcagaccgatggttccatgaccctttacctcaacaccttcatacagctgctgggcaatacgcatggtcttctgggtagagaagtttaatgccttggaagcttcctgctgtaaggtactggttgtaaatgggatgggcgcctttttgatacgctctcccttctttacctcgtctgccacatagctgacaccttccaaatcttttaagatcacatccagttcttctttactgtggatcgcagacttgcttccctttgcgcctttctcatttgccaggccgtagtactttgcatccagaggctttttgcttcctgctacatttaacatagcatccagattccagtattcctccgggataaatgcattgatctcatcttctctgtcacagatcatacgaagggctacagactggacacggcctgcacttaaacctctttttacttttgcccagagaagcggactgatacggtatccaaccatacggtctaacatacgtctggtctgctgtgcattgaccagattcatatccagatctcttggagattttaaagatgcttttacagcattttttgtgatttcattaaaactgatacgatatacctgtttatttttaagctcatccagtttcagggctttcatcagatgccaggagattgcctctccctcacggtcagggtccgttgccagatagatcttatctgccttttttacttctttgcgaagctttgcaagcacatctccctttcctctgatcgtaatatattttggttcatagtcgtgttccggatcaaagcccagctggctctttggaaggtctcttacatgaccgccggatgcatctacttcataattgcttcccaaaaatttttttatagtcttcacttttgcaggtgactctacgattaccagatgattcgccattgtaaactccttattcctgttcctatatttatgcgccatatccccaatcatcaaatcctcccggaagctttcacgggagtgtcctattagacagatatgcatccggaaaccgtgacagtcctttaaaataatctttttgtataataaagtcctgctgtcctcacagcatatccacccagttctaattccaaaagtgcatccatggactgacttactgacaatcctgtcctcaatgctatttcctctatatgacgcggttcgaaatccaagcaactatacaccattttttctttctttgcaagtcccttctgctttttttcagaaagcttttctttttcttttacaaaaattcccagattatccagtaccgtttccggcgaaaaaaggacctgggccccttctgagatcaactgattacagcctgtacttaaagcgtctgtgatccgtcccggaagtgcatagatctcctttccctgctctaaacctgcctgggcagtaataagggatccacttttttcttttgcttctatcaccagaataacatctgacaatccactgatgatccggttgcgaacaggaaagtttctgggaacaggaggagtttttaaactgtactctgagatcagtcctccatgaaaaggaatgctctcatacagttcatagttacttctgggatagcactgatctacaccacagccaaggactgcataagtcttacctcccccagctaaagcaccctcatgacctgcgccgtcaattcccagtgccataccgctgatgacctgcacaccggcagctgccagttcccgtcccatatagtcagcagtctctcttccataggcagtacagtttctggccccgatcacagccgctgtagccctgtcctctgcgggaagttctccttttatataaagccccatgggatagtcgtatacagaatacagtcttttaggatagtctgcatctaaaggtgtaataaaacggattcccttttcacttagcctgtaatattcctcttccagtctggaaaattcttttttccagttatcaaaacgataggcattttcttcttttttaaaaattccttttttccataattgtgttccttctatataatatgcttctctgaaactgcctgccagctctccgatccgacgtatctgcaaagcccctgcttccggcagatgacaaagccagtacaaagatactttttctaatgcttctgcccccatatccgttcctccaatgcacgatagccaaaggcttctgataaatgttctctctgtatccattcttctcctgccagatctgcaatggtcctggctgtttttaataccctgtggtatcctctggcacttatcccccttgcctcatatacttttcttgcaaaccggcgctctgcttcttttaactgacaaaaacgctggatctccttctgtcccatgcggctgttactgtggatatccgttccctggaagcgatgattttgtatcttcactgccttttccacccggctgcggatcgtagcggagtcttcatttgccatggtctggtcttccaattccaaaaatgaaaccggcgctgcttccacacagatatcaaagcgttctaagatcggtcttgaaagccggtttaaataattttgtatctgcatcggtgtacagctgcacctgcttctgtctggaaagaacccgcagggacagggattcatggctccaaggatcagaaagtctgccggaaattcgtagcttcctgctacacggcttactgtaatacggtgctcttccaaaggttctcttaaagcctctatggcccctttgctgaaatgaggcagttcatctaaaaacagcacacctccggaagcaagggataattcccctggtttaggcacttttccgccgcctgtaaggccctggggtgaaatcgtatgatgtggactgcggaaaggtctttgggaaagcaatggctgtcccttgggaagtaatccgcaaagactgtaaatctttgatatttctatattttcttcccaggaaagagctggcaggatcgtaggaatacgctttgccaccatggattttcctgttcctgcgcttccgcacatcaaaagcccatgtcttccggctgctgctacttctgcagcccggcgcaaaacactctgaccacatatttctttaaaatcaaatagatactctggtttaaaagtccgtctgtttatattcccagatattcccagatccatatcttcccagttatcctgtgataaaacttcctgtaaatgacgaagggactgtatccctatgatctgtatcccttctaccagagttccctctgatacattcgccaccggtaaaaggcaccgcctaaatcccatcttttttgcagccgataccaggaccagcacaccccttacaggtttgacactgccgtctaatcccagctccccgatcagcagggcatcttttagtttttctgctgataacagttcaaacgcccctaaaacagcggctgcaataggaagatcaaagactgttccctcctttcgtcttccggccggtgacaggtttaccgttattttctttgccggaagctgaaaatctgaatttttcagcgccgttctcacccgttcctgagcctctcttacttccagtgccagctgcccggaaatagaaaacccaggcagtccattggatacatctgcttctacagataccagaaatccttccattccccggatcccggcactgcttatctgcgtaaacatgcgcaacgctcccttcttttgttttttcgacaaatggatacactttcccctgtccttccctgtttattttgggattaaaatagaattagtaaaagtaaaaataatagatactttagaataataaagataccagccgtatatatcacctgagggtgacatcaccagtgtatccaacaaaagaagaaattgcaagcctatttttacgaactgcaacaaatctgcaacaaatttatcactgaaactccgtcataagatccctgaaccgtaaaggcaggtgatttctctggcagtttggattttttctctcttcaatagcgatcgctgtaaaaaaagtcttccaaagtttggcccagttttcctctgttccttccctttgcaggcgttccatctcatcagatgaaagttcagccaaaagccattttctccttctttcatgtattactgccttttttcttcctatatcacagatcagccagttttcttctcccagccggtctgcaaaataaggtgcgatcagttctaacacatcatttttcggctgtatctttccggcaagaaagcctccctccatctgcgaaaaccgcaaaaattcaataaactgatgtttttcattatacacactgcgacacagcttaaatatctcatggactgcagggatctgcagctggtctgcggccgatgccccccgcaaaaacagcactttcagataccggtacattttatccgcccgcaaaacatcctcgctgagactggccacatataactgctcctgaatatgggaattcaatcgctgacgtactgtctccaatacctttttccctttttcttctgatggactgcattccctgtatacagcaaaaagctctacattttgcccactgttttttatctccagccgcagttcatcctgtggtatcttactgactcccgcatcatagataccacttaagatccctgtataaccaggttcgcacaaaaagatcgtcatgttcgtttctcctgtattttctcataactgtccaaaggcagcacttcccgctgcttcctttaccagctgatcctttaaaagagagtttttctcttcttccagatgcatatcatcaaacagggaaagctgcctgtagctgttcctgttttcaatgtcccatatcttccgtctttcatctcctataagggcactggttatatgatcttcatccaggctgcaggagacttccattttcccggaacaggtgataaaataacgggctctttttaaaaccacaccgatccgttttaagccatcaaaatccagttttccctgttttctggcagcaatgatccgtctggctgattttacgcccactcccggcacgcgaagaagctgttcataagaagctttgtttacttctaccgggaactctttcagattttgcagcgcccagtcgcattttggatccagtaacaggttaaaattcggtttcttctcggaaagaagttcctctgccttaaatccgtaaaaacgcaaaagccagtcagcctgataaagcctgtgctccctcaaaaggggcggtccccccggaagagacggcagatggctgtcttcattaaccggaacataggcagaataaaaaacacgctttagtccaaaattgtgataaagggcctgtgtcacggaaagcatctgaaaatcattttccggtgtagcgcctacgatcatctgtgtactctgtcctgcaggcacaaaggcttttgtcccataatggcgctcttttaatgccagtgccagactgtctgctttgccaaaaggcataagaagatctttccctgttaattcaggctgtatcagagatgctcctcctgcaaaaccagccctgtcagaagggaacattttcctgtatcccctgtcataccctaacagacgtccggacaaagcaatcccctgctgtacctgacgcataggtgcaagtatcttttcccttgtttttccaggtgccagttctcttaatcctgcagctgtaggcagttccagattgatactcatacggtctgccagaaatccggttttctctaccagttccctggaagctccgggaatggattttacgtggatatatccattaaaacagtaaatattgcgcagcttataaagggtctcatagatcagctccatggtatgatctgcagtagaaaggataccggaacttaaaaacagtccttcaatataatttcttctgtaaaattccatcgtcagctggcagacttcatctggagtaaatgcagtacgcactgtatcattggtacagcggtttacacagtatttacagtcataaatacactgattggtaaaaaggatcttcagcagggaaatacagcgtccgtctgctgcgaaactgtgacagatacctgcctcagaagaatttcccagatgacctttctttccacggcgctgtacaccactggatgtacatgccacgtcatattttgccgcatctgtcagtattttcagtttttcctgtattgtaagattttcctgtatgatcaacttctcatcaccgcccgaacatttgtttgttttcttattttatcacatgggtcagagaaatgcaatggaaaaaccgaacatttgttcctgcttttaggtaaaaatatagcagcacagaaaagtttctctgtactgccatataaagtgctacgatctatgaatgcttaaaactaatctctgtagccgtttggattcatactctgccatctccaggaatctgcacacatttcttcaattcccttttctgctacccagccaagttcttcctttgcctttgtacagtcagaatagcaggtagcgatatctccgtctctgcgaggctggatctcatattttaaggtctttccgcaagccttttcataggcatggagtacatctaaaacgctgtatccaacaccggttcccaggttgtagatgctgacaccttcttttgcttccagcttcttcatggcttttacatgaccctttgccaggtctactacatggatataatctcttacaccggttccgtccggagtatcataatcatttccgaatacattcaaatgatccagttttccaatggcaacctgtgcgatataaggtaccaggttgtttggaatacccttaggatcttcaccgatcagtccgctttcatgagcgccgattgggttaaagtaacgcagcagcattacattccattcaggatctgctgtatgcaggtcagtaaggatctgctctaacattcccttggtgcgtccgtaaggattggtgatctctcccttcgggcacttttctgtgatcgggatctgtgccggatcaccgtaaacagttgcagaagaactgaatacaatatttttaactccgtgttttctcatttcatcacagaggatcaaagttccggtaatattgttgttataatattcaagaggtttatgtacagattccccaactgcctttaagcctgcaaaatggatcactgcctcgatctcttctttatcaaaaatttcttttacttttggctggtctaaaagatcaacttcatagaatttcagtttctttcctgtgatctgttctactctgtccactgcctttttgctggagttataaagattatctgctactactacatcatatcctgcatttaacaactccacacaggtatgactgcctatatatccggcacctccggttactaaaatagccatcgtattatcctcctcgtttcttatctctttcttcccaggaacaaattttgtccttttgtaatagtatagcctgaaacctcaataataacaatgcatattttttctcttttttatgtgtttttattggattttttcaaattcttccctcaatttcccaattgcctttttttcgatccggcttacatagcgactcgcctattgtaaacgatttgccctaagaaattgcttccagttcacggaagcggaatttgatgataatttgtttgtcctcggtcaattcgactcgctcgatgagactgaccagtagttcacggctggtgtaagccgaatctaaaaactgctgcaccagttctcttgctcggtcctcggtgctgatcgggctttctttttgtgcttccagctccttcagcttatcttccagagaattgcgctctatcttgactcgctgatagatgcgctcaaaatcagcttcagccaacagtccggtgagccgatccatatacatcttatccagattggctgtcaggctgtcgatcttgccgtgcagtgattggatctcagcttcatggctttctgtctgccgagctttctccacagcatccgctgcaatgggctgaagcttctttggatcaagataagcttcacagacttctctcacttttgccagcacagcttctgtaacaacctgctctttgatagaatggcaggaacagacgcccgctttcgtgaagcgctgataggttcggcatacgaagaacaatcgatcctcaccggataccggcggacgattgagcaccgccatggggtagccgcactcatgacaaaaaatcaagccttttaataaaaagtcgtaggttctgctgcgggtgtgctttcggctgttgaccagcatccgtaccttttgaaaagtctctttatcgatcagcggctcatgggtgttttcaacaaccacccagttctcacggtcctgtttcagacactttttggacttgtagctgatcttcacagttcgtccctggaccatattgcccaggtaggtttcgttctggagcatctcagagatacgctcactggaccacaggccggcgtaagggcctttacgtcccatgttccaaccgcagtaggttgctggtgtaggaacgccttcttcattaagagttgctgcaatctttcggcagctcatgccatccaatgccatggcgaagatccttcgtactacaggagccactttctcgtcgatgacgattttatttttctccgtcgggtgcatcttgtagccgtacatgggctttccaccgatgaactgccccttccgctgcttatctcgcttgacggatttgatcttcttggaaatgtccttagcgtacatatcgttcatgatagcacggaatggggtaatgtcattagctgtggactccacaccggtgtctatgccgtccaacaaggaaatgtagcgtactctcttttcgggaaaatatcgctccatataatgaccggtcatgatataatcacgacccagacgggataggtctttggtaatgaccatattgaccttcttggcttcaatgtcaccgatcatgcgctgaaagtcgggacggtcaaaactggtgccgctccagccatcatcgatataggtatcgtagacggaaaggcgatgttgctgaacgaactcgttgagcaaggatttctggttggttacactctgggatggtccttcggtctcatcctccttcgataatcggatgtataatgcgacatggtaatccattgggttgcttatttctaagtacataggttcctccttgaaataagcagccactcatcgcaaacattgtacaacaggcatctctggtgtcgcaaggatgcggataagataaagccgaaaagactcctccagcagctctgcgaggctcttttcggcttcggtatatgtgcaatgcactacaggcagggtttgtttcatacgttctacctcctttgttcatcgtatgtaaaggggcagattttcttgcctgtccatgctgtgaaattaggccattccctaaaagtgtgcagatgcacggttttagggaatgaaaagtgagctgcagaaaaacagatcacactttatccatcttgaataaaaggaaaaatcgtgtagaattaagatagagtatatgatgtggaggactcttatgggagaaaaaatcttaagttggtttgaaagaatagtaacaggcgaaaaacgcagatggttttttgccgcagtaattgttgccataattttgggcgtaatcgtctttccttatatcgacgcaaattttctttactacaaccgaattgaaaaaagaattgacaacttgacaaatcttgtaaatttaactggcgtgccactcgaagaaaatgagatgctatatgaagaatacttaagtatattagaggaagtgaaaactgcacgtgaaaacgctctgtttggttcaggaaaagcagaggattcaagaactgatcgcatgtggaaatttgctggtggagctttcttatgggtaatcattgctgtcgttttactcttctccaagaaaaaaggagaacaacgtacattcaaacactgggttaacaacatcttttctgcaattatttgtttggtattcggtggaatcttaggacaagtatttgtttatattcccacgattggatcttcaaaagtcaattttattcttgctcctattgcagagttcatcgtcgtgtggttactaatggaatcaccaaaatccaaagcaaaagaaaattaatattacagcgtgccttaatcttattgatcaaggcacgctacttttatggacttcttaaaaagctgtgtaatattaaatttaattttgaagtaatctctaaacatctgcttgtggtttatcggaaccatcttgaacgggtcagtgattagcagttctggttcaatcagcaaactcattgcaaagcagtgagcgaaaaactcaggaatgtcgcactcaacagcatcaactccaattaacttcattactagagcaaaatcttcgggcggtatttctggatcaccagtcaaagcaatgttcacgcaatgacctagttcatggagaagcatactctgaggagtcgtttcatggtctttatgcggaatcagcatgtagatatccgctgccacactaccatcggtcatattcatgcaacgacaaaatgaatcttctgtgcggtgttttgcatggaataggaaaatgaacaaatgctgttcacgtagaactcgcttggagaaatcatagacacgctctgcaacctttatagtttccgcagccgcttctgctgtcagaaacttatcatcacaatcgtcgtaattctcagtgatatcattagccagagcactcagctgtgcaacattctcttccactcttctactgaacgaccagttgcgatagaggtacatcatgcaggccgcattaccttccacaatgctccatccaggatgacgatccatgaacgcctccatgatcagctgatcacatctggcacacagttcctgatgcagctgttcataatcacgctgagaataggtttcgactgcccgtttcaggtatacagccagttcacttaatttcttgattgtgttcattaaatcacactccttttaggatatattttttgctaaccaaaccggaatcgaacgacactccatcttcttaggaggggaatgctccatcctactgcaaaaagccgcctgatttgcgtcagacggctctttttagatccctttataaaattctttctcaaagtcctgagcacattgcttccgacaggaatcaatgatatgaccatatcgctcggtaatcatttccgcctgtgcatgaccggagtcaccttgtacggccttgatgttgccaccggtcaacaccagtttgtaactgatgctgctatgtcgcaaactatgaaaggacactaccggaagtccgagttgcagcaattgcttttccagcaaacggggcaaagtttcctccgaaagtggtctgccattggaataccgcagaatcagatccggccggtttcgcttgactggtttcagtgtttccttccactcctgcaatgcatccagcacataatccggcagatataccgttcggatgctggatttggtcttggggcgtttcaacaccgtgaccgtccgcccttcatcaaaaactgagggaaattggtagagaatatcctttccgttcagcgcatccaccgcatccctgcggacacgttttaatgtcttgctgatagaaacagtccctttctggaagtccacatcatcccaggtcagcgccaagatctcaccttttcgtagggaaccggcaaaagccagatgtattgcaatagaaagcatatggttgtcgcagttctggatcaatatcttaatctcatcagtggtcagcatcggaatttcggttggaaaggctttcggaacacttgctttctggaaagggttcctgggcacatattcccacaaaactgcctgctcaaatgcactatgcagcagcttatgaatgttcgtcagtacggagggcgtgattttgggatcagactgcaattttccatacaatgctgcaattaccttagggctgaactccgtcaaccgcatacttcccatgaacggaacgatatagttccgaatgagcccttcgttgctggtgtaggtagaacaggcccagtggatgcgaccgtacagttccacgtattcctccagaaacggcgccagtgctccttcccggtactgtgctcgctcgttctcatgttgctgaatcaagtccagttgttcctttcgcctgagggcagcttcataggaatggtaggtctcccacttttgtttcttcttgtctccatcgtatatggtgtacaccacgctgaagcttttattccgttgaacgattgatgccatgcttgttacctccttcttatcttggcggtttaagcatagcatccccagttttaatattatttttgacggcaggtgtccaaaatgcaacatttgaaccgttattatagttaaaccggatcagagattcggagaagcaattacagaataatccggacaccaaggaggcttgttatgatcccagaagaaatgttaagcgatgaactattacgacaagcaacagaaaaatgtgcagaggctatcatcgccaatctgccagcccctgaagagtgcaatcacaagttttccaaacggttcgaagaaaagatgcaggcactgctccacccaaagaccgtctgcatcataagcccagagtatatatccaaatagcaagaacggcggtgatctcaggatcatcgccgttctattgttccgatatttgtcgaatgttggttgatatcgttccaataccgatgtatactttaattagtgaaactatatcccatcgaatgtctccaaaatgtctacacctaatagatcacaaataagaggtaataatatggataatgtaccagaaagcatctataactatagaataaataaaatcaacctaaaagatggtactcccgttgaaccgggcagaatcaatgtttttgttggtgccaataattgcggtaaaactcaattactgaaggatatgttagcctatatgactggatcacgcactgaaccagttttactgactgatttagatttaccgtatccttctacttgggaagaattaatcgctgcatatcctatgaacattgtagatacaaacggtggactgcaacagctcagacatatttcccctacattaaatgcgcaaccagctggcccccaaactttcaatcttttaaacactttaaaacagcagttaagaaacaccgataaacgtgagtttcgtcaatcaactggccaaggaatggtaacatttttaaatacggataatcgactcagcttaacccaaaaatgtacggtgcaaaatctacagacagtaggacctaaaaatgtattagaagcactataccatgcagacatcgccgcccctaatcgtattagagaactggttaagagtacttttaacacggatatatattttgattacaccgatccaggaactcttcagttcagaattggaaatgatttttctaccatttccgaaaactctcgggttgcgtattcacaagtatctcgatatccaattttagataatcagggtgatggcctgagaagttatgttggaatgataagtgcactcatgtccctttccaagcccatcatacttttagatgagccagaggcattcttgcatccaccccaggcaatgcaacttggcatgagcattgcaaatctggttaaagattctcaacaaatattcatttctacacacagtgctgattttttgcgaggattattaagctccacgaatgatgccgtaattgtccacttgtccaggccgactgaaacattaacaaaagcgaatgtcttagattccgatacattgaacaccataattaaagatccactattgtcttcctcaagagttcttgaagggatgttttataaaggtgttgtggcaacagaagccgatgctgatgctgtattttaccaacggctgttccaaaaaattggtgcatctgatgagattcattttgtaaatgcacataataaacagacccttaaaaaagtaattcaaccatatcagaacctgggaattaaatttgcattgatagcagatgcagatgttattcgagataaagttgagtttgaaagcctaattgacggtattatggaggatacacaaaaagagtcaataatgagggaacgtgaaatagtatataactattttcaaaagctggacaaacatactattcttactcagttaaaacaaaaaacgcaggaatttgctagtcaagatattcctgcgtcagatgacgatccacagaaaattgcttctgctttgttcgatttcagaaaaggacttaagaaattgcgagatgatgctgacgaactcgcaaacctaaaagaatggggacgcaaagcacttgatgctgatgtagcaacacagcaagaattcgacaagctgcttgagcattgcgcaagttctggtctatttatcgtccccgtcggagagctggagtcttggttggttgactacggtgttgcaaggagttccaataaaacaaaatggattactcgagcactcgaaaaactattcgaaatagactatgattctgaaaaacgaatttggagattcattgatgctctgaaaacatatctaacgagcacttaactgatgagtggccgcttaactaaataatccaaaacactgatgcccggggagcctatatggccctccgggcatcgtttacattagtggcggcgctatacataggacctggaaatgcctaaaactcctgctacttcccgctgggtgtgctcttttcccttaaacagtccatagcgcatggagatgacctgtttttcattttccgtaagtttctggtcaaaggcctgatacagttcttttatatcctgatccaggatcagctgatcaatggtctttggattttccatttcgatcacatccaccaggctgactgtttccccatctttatctgtgccgatcggttcaaataaagatacttcttttgcccgcttttttcctgcccgaaggagcatgagaatctcattttccacacatctggccgcataagtagccagtctggaacctttatctacatcaaatgtatttactgccttgatcagtccgatggttcccgcagaaaggagatcttctgtatcatagtcctgacattgatatttttttaccacatgagccaccaggcgcatgttatgttcgatcagcatatttctggcggtctggtcgccttctttgcagcgtttcaggtacagcttttcttctccgtgggatagtggtttcggaaaagtcttcaaaaaaagccaccccgcatgttcttactaacatattatgcgaaggcggcttgcccggtgctatttttctattcatcctcatctggtccaaataggctttgacacatgggcattcataccggctgcaagactgttctgcacatcatcggagaaagcattggcaatcattgcaatgatcggtatggtacgtcccagcagatttttactcctgcggatcgcttttgttgcttcataaccgttcatatgaggcatctggatatccataaggatcgcatcatattcacctggccttacattttcaatgaacaccagtccaaagcggttgcttccaagccacaggttgtccataaaatccggttttttgaacatgatctcactgtcaatgtaaaaattgtcatgaacagcctggatcccatacgtatctcatctatctcattcttcagctgcgttattttcttctcctaatgtaaacaaaggctcgtatttgcggctgtctatgctgtggttataagccatggcctcgtagtctaaaacctgttttctatgagaattttcctcattctctgtttctgcccaggactgataatttccctcattatcataaaatcccaggaaatgaaggaccggataagtctcagacaattctaacagaaaacggttatagggtgtcatatcaagacctgccagttttaatacataagaagacagatacactgcccccagctttcccatatcttcagacggctgttcataattggtccagataataaatggagtctcataccacatcaacctgtcttttaccggcacctcataacttggcgtgccgtatacttcatcaaagaactcatcttccacacttggctggtgatcaccgaacataacaatcatagtcggttcatcgctgtgactgaaataatccagtaaataggcaaatgcatcatcggaacgctttactagagacagatactgatctgcttttggatacttcccttccatatctcccgtcagccatactgtctggtcaaactcatcaaatgttccctcataaccgccgtgattttgcatagtaacattaaataaaaacagtttttcctgtgggtcttttttctcttctactacctggatcagcttttcaaaatctgcctggtcactggtatagtaacgcagctgttcgctgccctcataataatcaccatctaaaaactcatcaaatcccatattggtatagcaggtatttctgttccagttttctcccggatatggatgcatggctactgtacggtatccctgatccttcactgtacttaccatagtccatgcatctggttttacattaaactggtaggcaatggagttagacggaagcatggcaacggaatcccccgttaaaaactcgaattcagaattgctggtcatagaaccaaacacaggcatacaaagactgccctttactgtattttctgtcaggctgttgataaaaggaaaatattcctggtttgtggaaaaatctccaaccacccgcaggtcagaaaggctttcattcataatacagatcagatttacaggctgcaccgtctcttccccggctcccgttttctgtgtgccttcggcctttgcttccttttcctgctcttctttctccgttaattctttataaatggcttccagttttccatggctgtattctacaggaggttttttcaccacatactgaagggacatagccgtagataaaatataaccgcaggagtcataggtgtcgttgaccgcccacatattgatccccatctgatgggcaggaactacactgtgaaagaagccaaatacaaaagctgctgctgttcctatacaggtgccgccaaagaccagccgttttttgaggccttttacgtggaccgggaagaaccagaggatcatattggctccgatcacagctttggctgcctgtatcatctgctttgtaacatcaaattcataatttcccgacacagtcatggcagtgcgaactgccagcacatcccagatcatgatcggccggtcacgaaaatctactacaaaggtttccgcaaaagaaaggatcagcagggcaatggacacgaccggcacagatatccttgtggttcctgtaataccggtaagtacaaggtacaatacataagcccagcatatattcaaagccgccataaaaatggaaatattttccagatttcccgttacatactcaaatagataataagataaacagggaacaagaaaaagacacagatagcctgtgccttttatcatatatttacatagtttccagatgatattttctttttttacggtttcttcttttgtggttgtactctctgcagttgtattctctgaatttcttgtctcttctgccaccggcgtctatccttctcttcctgtatcgccacttatctgggatatcatttctcgcatacttttttgcatactattaaaaattttaacacagtttgtaaccactttcaagaatcaatctgaacggatctgtccaatcctgttacaaccgggtactatatggcaaagctgctacaggcgtatcacatacttgcctgtgataatgcgtctgtagaaaatgatcgtcaggaccgttgctgcgatccatccaaaaggccatgccatccagatgcctgtacttccaaaatactgtgtcaaaagcaatgctaccaggatacgcaggatcagatccggtactgtagccattacaaaataatgcatggcccctgccccgcggataatgccgtctgtcattaacttaatagatatcataaaatacataggacttacaatatgtaaaaatttctgtcctgcattgatggcatcgatactggagtcatttaaaaacagccccatcatctgtctgctggcaaagaaataaaggactataaaaggaagggaagcaattactgataaacggataccggtacgaaatcccaaaggcagccgttctttctttcctgctcccaggttctgggccgtatagctggaaagacagcttccaagagccataaatgaattgatagcaaaagtatttaacttgatagcaccggaataacctgcgatcaccgcggaaccatagcggtttacgatctcctggacaaacatatttccaatggataaaacgctttgctgcataatgcttggaatggcaatggcagcgatctgggctaacagtacaaggtccagccactgaaaagttccctcacagtttatctttttcaggcgcattgccagaaatgtaagtgctaaaatagcagaaataccctgggcaataaaagtagcccaggcaacacctgctacccccagtcctacacaggctacaaaataataatccaggatgatatttcccacagatgaaccgatcaggaaatacaggggtgtttttgagtctcccaatgctgtgaaaataccggtacatacattatacagaagtaaaaatgtgatgccgtaaacatagatctttaagtataactgtccgtctgcaaagatattttccggtgtgtggacagccctcatcatactgccgcagaagaaatagccgatgagtgtgaggaaaaagctcataaaagcgcaggcaacaaaagccgtgcttaccgcggatttcatccttgccatatccttagcgccaaaaagcctggaaaccacaacagaggctcccaggttggtccctacggcaaacgccataaatataactgtaatgggataagacgccccgactgcagccagggcgtcctctcctgcaaagcggccggcaatacagctgtccgcaatattatagatctgctgaaacattacgctgactaacataggcagcagaaagcgccataaaattttatccggatgctctctggtaagatctttcatcataagtattcgtccccccttgatctcagccaggggtatttctgcctgtggtcagtttctgatcatcctgatcaaagcagtttctagtgatggaacagacggataccggtaaatgccattaccatgccgtactggttgcaggtatcaataacctgatcatctcttacggagccgcctggctgtgccacatattttacaccgcttttatgtgctctgtcaatgttatctccaaatgggaagaaggcatcagaacctaaagctacgtctgtaaggccgtctaaccatgctctcttttcttctcttgtaaatacttccggtttttccttaaagatcttctcccatcttccgtcagccagaacatccatataatcttcaccaatgtataagtcaatggcattgtcacggtctgctctgcggatgccgtcaataaatggcaggtttaatacctttgggttctgacgtaaataccagttatctgccttgctgcctgccagtctggtacaatgtactctggactgctgtcctgcaccgataccaatagcctgtccgccctttacaaagcatacggagttggactgggtgtattttaaagtgatcagggaaattaccagatccatagctgcttcttcggtcagatccttattttctgtaacaatatttttaagcatttctttgtcgatctttaaattattatggccctgctcaaatacaacaccaaatacctgcttacgctctaattcttccggtacatagtcaggatcgatcaggatcacattgtagttgccattcttcttggattttaagatctccagtgcttccggttcatatccgggagcgatcacgccatcggaaacctcacgcttgatcagctttgcagtagcaacgtcacacacatccgataatgagataaaatctccaaaagaagacatacggtctgctcctctggctcttgcataggcacttgccagcggggaaagttctccctgatcgtctacccagtagatcttgcgtaaaacatcgtcaagtggcagacctactgctgcacctgcaggtgatacatgtttaaaagaagttgctgccggaagtccggttgcttcttttaattcttttaccagctgccagccgtttaatgcgtctaagaagttgatatagcctgggcggccgcttaaaacggtgactggcaggtctttattgtcattcatgaagatctttgcaggtttctgatttggattgcatccgtattttaattccagttctttcatgtgaaattctcctttttataccaaatgtattttcaaagtcttttttgcaggttctttctaaatctactgatctgtattgagctttacttattcttgtttacaatacgggactcccattttccggtttcaatatcaataaaacggacaaacagagataccttattgtcctcgtttaaactgttccataccttatctgtaaattcatcaatattgccctcgatctctacaggctttggctcaccttcaaaacttggaaggggattgccgtcgtgcatataagtatggatgaaatggcccattccaggaaccggattctcatatgcgaaggtaaaacgcaggcaggagtcaggatttccctggttgctctttaaaatggacatggcatagctgtatttctgattttccacatggagaacgccggaaatacgtggtgtgtagtttggtgcatccggttcaaattcacggctgcgcagggactgctcaaaggtaagctgatgatccattccctcataaatggtatccgtctggtcaccgtttgtaacaatggtcttatttcccagtacacgcaccggagcgtagatgatcaggcttggatcctctaactttgcaggatcaaatgcctgggtgcggatcccgtttccatcttctacaaatacacggttgcggctgttggagctgcgtcccatgataaaataagcggtaactgctgtcttgccgtccctgctttcgccaatgacaattccacggcccgggtatgcattctcttttaattcctgttccagatttttcatatacatggtatgatcctcctgatttctataaggtgtaaggtgtatgtattcccgccaaagcaggaaacagatcagctatagcattcaaaaaaccgcccacctgcacacgaataacctatttcgtgcccaggcggacggctctcacttcctgcgtgctccctgtggttgatccactttccgccagtcacacgctgtgctttctaactgtttttaatatatatggtttttactaataatgcaagtgctttttagaagttttacttattagtttttcttataatttattcattgcggatcgcagctaaggggcttaatttcatagcacgcatagcaggcatgaaaccggctgccattcccacaaaaatagcaaagcctatagctgcaaatgccagccataaagggatcctggataaatttccgctcatccccatcatatcagacatgcttacaaaacggttgacgataatggacacaccatagcttaacagtgctcccagcacgccgcccataaaaccgatgaaaccggactcgatcaaaaacatactgcggatatttcccatatcacagcctaaaaccttcataacaccgatctctttggtcctctcataaatggacatcatcatggtgtttgcaataccgatagctgctacaaacagagacacagctccaatgcccccaagaactgcctgtaccatattggactgctgtctggagctttccagccagtccatctggctgttgacctgatagcccttatctgccaggatcttctgcacctgggccacatgttccatatcatctacaaagacttctgcactgttgtatacaatataatttaatggctttccttttttattcgtaggctgtcccgggatcacggttccctttttaaaagcctttttcagctgttcttttaagccgtcaatatctgcatatacagaccaggaataattattccagtcatcgatgccgcctgcgatcagtcctgttacagggatcatatatttcttcggcggtttcacactgtttccatcatctcccgtgccgcctccctggctttgataataagcatccatatcaaaaaccacaaagatcggctttcccataagatccacatccggcagttctcccgtatcccagtagccttttcctgttttcgcgttggtaaaacgctggagaacaccatttccaaagaccattcccatttcaccgggtgccgggatacggccttctcctaaattcagctgctttaaataggactggctgacaccggtaaggctgatatactgagcctcataagccccctggcgcatcagcacattcatttccaggaccggagatacacctgttacataggggatcctggaaaactcatcaatcacatcatccgtaatataagatggctcactgcttttagatgaggatgaagagccggaacctcccaggatccttacagagtttccattatcatttgcatacacctctacggtagtcagactgccccaggaagcgatctgttccatggtcatctcatttaaaccaattcccagggaaaccatgactacgatcgaagccgttcctataataacacctaaaactgtaagaaatgtccttaattttcgtctgcgcaggttattgacgctcatcatcagaagatcaggaaatctcattttcatcatccttttgctgttttgcttctttgcgctttttgatgaacttcactgcaaatacgattgctgcaatgacagccacaaaagccacaccgcctcccgctaaaagaagcttattgtttgccccggaagcaggctgtccggaaacatccatatcttccggcacatccatattccagtcttcctggacctcttcctctaccagaagagtcagctctttttccaccggctctgcaggctgtccattttcatcttcatagttgatgatcacatggactgtaccatcatctgccgttgcggcgataccggaaagcatggtatctacatttcctgtttcacctggtttgatatttcctacataataatcggtcggtttaatggagtcagcttcaaaattgacagtcacattataaaggactacttttcctgtattgttaatgccgaacataacattggactcagaacctacggtcatggagtcaggcattacatccatattgctggtgctcagtcttgcatactgctttaccgggatatccacgataatgctctcttctgcgttcttaaattccgggctgtcatatttttcttttactgtaatgccataggaacgctggtcaacacctgctttggctgtaaaacgggcccggacctctgtactttctcctggtgccagggaattgactactttggaagcagttccgctttctgtggtaaatacagcgctgtcagaaaccttttctgactccagattaaataaaatattgctggcaggtactgcagaggaggcatttttcatgcttaaaataaggtcgaattcttctcctgcatacacatccgccggttctgtgcggtagctgtctacgatcacacgggctttggtacggtcattggcatcaaagtcacggagatcatcttctttgtccttggataccacatggacgaaaaatgtattttcttctgtgtgaagatcaccttcagaacttaagcggaaagtaatggtaaatttaataggataatacccggtataagagtcttttcggatagccatgctgtagtgggcagaaacgctttctcccggctggatccggtcgtaggtgcggtcatagttgccatcgttgatttcaaaggggaacttggtattatcttccgataagcccatggatatagtgatatcctgggcggtagtttcacgcttgttgcggaaatttacatcaaaatcaaggacattgggataaacacctcttggagtagactggttttcgcctactacaaaataatttccctcttttttgtcttcttcatcatctgctgaggaagaagcactggtggagatccagatattaatgtaatctacatcggaaccgccatcccactccaactggatgggaatgctgtaatagccctgtcctgcgtcacggcgtactctggcagaaagggaaacactttttacatttcctgccttaatatttcccacatgtttggcagtaaatgtagtctccatgatctcaaacggataatagtcaatggtataatcattttctccgctgctttcgatctgctggaaatcactggtctcaagaagactgacacgcaggttgttcatatcctcatctgtagcacggatgcggaaagggatgctcatggatttaccaatatttccctttggtgcctttgtggtgaatatgtaatcattgctgctggcattggtgttataccccagcttaaaatcaccggcataggcactcaggcagctggcggcagcaaatacccatataaaggctaaaagcgccatttttttccatacactgtttctcattctcactctctcctctgacccacttctatatttacgatcttgccgtctacgatccgtatccggcggtccgcataggaagccaggttattgtcatgtgtgaccataacaagggtctgattttgctcccttacaattttttgcatcaactgcaatacttccatggttgtttttgagtccaggtttcctgtaggctcgtccgcaaagatgatctgaggctttaccactaaggctctggcaatccccactctctgctgctgtccaccggacatctggtttggcatatgcttttcctgtttgtctactcctactaattccatgtactctcttgcttttttcagccgttctttctttgggacacctcgaaatgccaggggaagtgccacattttctatggcattcatggtatttaaaaggttgtaggactgaaagataaaacctaccttctcccgcctgaaagctaccagctgtttctctgtcaatttttctatatgtacatttccaataaggatctcacctttggtgggcttttccagtcctgcaagcatatttaaaagggtagatttaccggaacctgaggttcctacgatagctacaaattcaccttttgggatctcaaaactgactccgtttaatgcccggactttggtttcgcctacgcggtatatcttatagaggtcttttacgcggatgaccgcagacggctcttttgggggttctgtgttcacgaaagaaaagactcctttctgcggcagcaggcggaaccttcgcagccgcttgtttttctcctttgctcatcacattataccatagtatccccgttcaggctctctgtttttccttgaaagttccttaaatatttcttactctgtaattgcccgggtactgcaccatatgcgcagggacaatttcataaaattttacatttttccataattgtgcttgacttcctaggagttttgtgtaagaatatgtcgaggcacaaaatcagtgccattctggctaagatcagctgtcgcactggttcagtgctgaagtatttcccaaaatcatgtaattgaatataaaaggcaaaggagaatcacatgagacacttattgaatcccttagacttctctgtggaggagattgatgatcttctggcgctggcaagggacattgaaagcaaccttccaaaatatgcccatgtctgcgacggcaagaaactggctacattattttatgagccaagtacccgtacacgtttaagctttgaagctgctatgttaaaccttggcggtaatgttttaggtttttcatctgctaattccagttctgcatcaaagggcgaaagcgttgctgataccattcgcatgatttcctgctatgcagatatctgcgctatgcgtcatccaaaagaaggtgctgcttatgtagctgcacagaaggcacgtattcctgttatcaacgcaggtgacggcggacatcagcatccaacacagactctgaccgaccttatgaccatccgttccttaaagggtcgtctggacaacttaaccattggcctgtgcggcgacttaaagtttggccgtactgttcactccctgatcaacgctatggtacgttatccgggtgtaaaatttgttctcatctccccgcctgaacttcgtatccctgacagcatccgtgaggacgttctgatcgctaacaacattccatttgaagagatcggaagcctggatgattccatcggtactctggatatcctgtacatgacccgtgtacagaaagagcgtttcttcaacgaagaagattacatccgcttaaaagactgctatatcttagataagaagagaatggcaatggcaaaggatgatatgtttgttctccatccacttccaagagtaaacgagatctctgtagaagtagatgacgacccgagagctgcttacttcagacaggcacagtacggcgtatacgttcgtatggctctgatcatgacattactggaggtagaaaagccatgttaaatatcagcggattaaaagaaggaatcgtacttgaccatattgaggctggaaagagccttgatatctactaccacttaggtcttgacaaattagactgtcaggtagctatcatcaagaatgcacgaagcaataaaatgggccgcaaggacatcatcaagatcgaaggcggactggataaggttgatctggatatcttaggatacattgatcatactatcactgttaatatcatcaaggatgaccacattgcagaaaagaaagcattaaagcttcctaagaagatcaccaatgtgatccactgcaaaaatcctcgctgcattacctctattgagcaggaactgcctcatatcttctatctcagcgatgagaagacagagacataccgctgccagtactgtgaagaaaagtacagcgatttcaaataaggtatataattgcccccacctgtcggtgggggattttttatgtcacccagccgttgacgcgcgtgactctgttttattatacaaaaaggaccagacacatttatcccttttatcaggataaaacgtctggtcttttttacatatcttctctcttatttcatttccttatttatgctctggcacgatctcgatccagtatccgtccgggtctgtgatgaaataaatgcccatagccggattttcgtagcagatgcagcccatttcttcatgctttttgtggatgccttcgtagtcatctacatgaaaagccaggtggaactcgcattcacccaggttataaggctctgtacggtcttttaaccaggtcagttccagtgtaaagtcggaaactccatctcctaaataaaccagcttaaaagagccgtcagaagcgtccttttcccttaccggttctaaccctaatgcttctttataaaaagcaaggctcttattaagatccaatacattaaaattaaagtgattaaacttgatcattgaacatacacctttctgtatttataagtatatcccctgtaaatgcaggggatatacttgtaatgtcatcttattatttattcttctttggaaccatagcttccataccgcccatgtaaggtcttaatacctctgggatacgtacagaaccgtcagcctgcaggttgttctctaagaatgcgatcagcatacgtggaggagcaactacggtgttgtttaaggtgtgagccaaatacttggaaccatcttcaccctgaacacggatctttaagcggcgtgcctgagcatcacctaagttggagcagctacctacttcaaagtacttcttctgtcttggagaccacgcttctacgtcgcaggacttaacctttaagtcagctaagtcaccggagcagcactctaaggttcttaccgggatatccatggaacggaacagatctaccgtgttctgccacagcttgtcataccacattgggctttcttccggcttgcagacaacgatcatttcctgcttctcaaactgatggatacggtatacacctctttcctcaattccgtgagcacctttctccttacggaagcatggagaatagctggtcagtgtcagaggcagctgtgtttccggagtaatggtatcgataaacttaccgatcatggagtgctcgctggtaccgatcagatacaggtcctctccttcgatcttgtacatcatagcgtccatttcagcgaagctcataacgccggttactacgttgctgcggatcatgaaaggaggtacgcagtaagtaaatccacggttgatcatgaaatctcttgcatatgcgatcactgcggagtgcagtcttgcgatatcgcccattaagtagtagaaaccgtttcctgctactcttcttgctgcatctaagtcgataccgttgaagctttccataatatctgtatgatatgggatctcaaaatcaggtactacaggctcaccgaaacgctcaatttctacgttctggctgtcatctttaccgatcggtacgcttggatcgatgatgttaggaatggtcatcatgatctttaagatcttctcggaaagttctgcttcttttgcttctaattcagtcagtcttgcagagttagcgctaacctgcttcttaacttcttctgcttcttccttcttgccctgtcccataagagcaccgatctgcttggacaatttatttctgcttgctcttaaatcatctgcttccttctgggtggtgcggttctctgcatctaatgcaataacctcatctaccagcggcaacttgctgtcctggaatttattcttaatgttctgctttacgatgtctggattttctctgacaaactttaaatctaacatgatgctcctcctggatcttcatttccttattatatagcgatcgtttatatggaatatattccattcttcgccaactgttattgagtatataacattttgtcacgattgaaaagaccttttttacgtttaaaagcattgaaaagctctattttcccttataacgcaccagctgccccatcagttcttcaaaacagactccattttcaacagggatctgaagttcctcggaacggcggatacaatcctttacaaagtctgctgcaagggcaaccccttctgtcaggcttccgcccctgacgcatacacctgccacaacagaagaaaatacatcccctgtgccaggacgttctgtaccgatctttttacggcggatgtaagtcattgcttttcctttttcagccactgcattgaccagatactgtccttctctcataccggtgatcacaacaccacaaggtcccatagcaagaagttctttcgcaagttcttctatctctttccgggtccagccttcttttttataaggacggtctgttaaaatacaggcttctgtaagatttggcgttaaaacatctgccatttctgccagttccttcattttccggcacatggcttctgtataggtagcataggcttccccgtgatctcccatgatcgggtctacgatcacctttgtttccggtcccttaaattccgtgatcatgtttttgacgatctggatctgacgttcagatcctaaaaagccggagacaatgccgtcaaaagataatcccagttctttccatttttcaacataaggttccattttatccgtataatcatcaaagaaataaaccggaaaacctgtgtgattggacagcacagaggtaggtaccggacaacactggatcttcagtgccgctaaaacaggcagagccgctgtaatagaacagcggccgtaacctgaaagatcattgatcattgcgatttttttctggtggtattgtgtcattgtatactcctggatcttatatatcccagtatcaccaggatatatttattttaatttttcaaacaatccggaacggatcagagccgttcttaccggcatatagatcacaacagatgcaatggtagatgtaactgcgttaatagaagttgctgctacattccatgcaagtgtcaactctgctgcaggttttcccatgatccataatttgtagtaataacctactaacggatcaaagatcacattaaataacaggccgctgactgctgcagcaatcgcaaattttaatactttcctgctgtcttttgtttcgttgatatgtccgatgtgatgtgctaccagaccggtgatcagaccgatgcaaagctttaagacaaaggtctttggtgcataaaacacatacttaggatcaaaaagatcgccgatggtcataccaatggcgccgcctaaaccaccgtaaaaaccgcctaaaagcaatgcgcctaaaacgcagactgcatttcccagatggatggaagttgcatctccgcctggaagatagatcttaaactgtaaaaatgtaaatacgacataagataatgccgcaaaaagtccggtaagagcgatcttataaactttattgctctttgcctctggtttttcctgtactgcctgtgctgtattcataactttcctcctcagaccggttttctgttaaaaatttatccggtcatttcattagaaggtatactagcactttgctggatggggttaaatatccagtttgtatattttaaaccagtccagtttacaacagcttatcagtcatgagactccacggtgatcaatacaccatctgaaaaagtgatcgtcccctcctcttccaccagttcattgctgatgcagaggctggtgcctatggagatatcccggtccgttaatggatatttaaagcctcttaacgtgatcccctttacttcttctgtaaggggcaggaaagagatatactttccccaggtctctccctttcggaaggtatgctccccgtcgatcagatacagacggttctgggagtctacgatctctgcataagtacctttttgcaggcacggaaacagcagatggatatttccgaccatatgatctaaccttcctcctgtagctcctaataacgtaatatggctgcagttcatggcaagagcccgcttaatggcaagttctgtgtctgtatcatccttttccggctgatgtacttcccatacgatgtgttccattttccggtaataggccagtatctccgggtggaccgtatcaaaatcccctacgatcacatccgggatgatatccagctcttttgcagcctccagaccaccgtctacggccactaccttttcaaatttatgctcttttaaaaaagaaccggcgaaagcaagggaaagcttcccgccggttaagatcagacaacgtttcatttctcgtattccttaaagatctcattaaattcttttactcttgctgccggttcagaaccaaatacagcagaacctgctacaaatacattggcacctgcttccagtacctctcttacgttagctgcgctgacgccgccatctacctggatatcggtattaaggccttttgcatcacacatagcacgtacctgttttactttttccaatgtatatgggataaatttctggccgccaaaacctgggtttacagtcatgatcaaaaccatatccacctgtcctaagatacattccagaacagatacaggagttgcaggatttaaagcaacgcctgccttgcagcctgcttctttgatctggtttacaacgcggtccaaatgggtacatgcttctgcgtgtacagtaatgatgtctgcgcctgcttttttaatatcttctacatagcgtcccggctcttccaccatcatatgaacatcaaaagtcatattggtaacttttcttaagcttttaaggacaggcattccaaaagaaatacttgggacaaaggctccatccattacatccaggtgcagataaggtgctcctgcttcttcgatttcatggacctgttctcccagtctggtaaaatctgccgccagtaatgacggtgctactttgtactccattgttaatatctccttttctgtttcagttcttcatacatcaggcggtaattgtcatagcggcttttgctgatctttccctctgccactgcgtcttttacgccgcatactttttctcctatgtggacacagcctaaaaacttgcagtcatcttcatactgggcaaattccggaaaataatcctttaactcatttgcctctatatccggtgtgaacatggagctgaagcccggtgtgtccatcatataagtatctttttccacaaaaaacagctgtgaatggcgggtggtatgttttccacgctcgatcttgcggctgatatctcctgtttccatatccgcttccggctggatccggttggtaagagaagattttcccacgcccgaaggacctgctaatacagtggtctttccgcgaagaaggcttctcacctgctcaataccggtttcttccctggcactgataaaatatacaggataacctgcagcctcataaatactgcggtactggtccatcagtgcctcatctcccagatcctgcttattaaaacacagttttaccgggatatcttccatggacatcatgaccagaaaccggtccagtaaatttaagttcggtgccggatgggtcagcgcaaacaggactaatgcctgatctacattggctgctgccggacggatcagctcattctttcttggaaggatctcatcaatatttccttccattgtctcttcatccagcacggaaaactccacatcatcccctaccagaggtttgatcttacggtttctgaatacaccttttgccttgcactggtatactttattttcaccgttatttacgtaataaaatcctgcaattcccttgattatctttcctgtcattatctttctcctcgcaatttttaccttaaatgttctcttagagtctttctgtgcctgattttgtgagaagattttttgtcagttgtgcccaaatttctgaggcgtacgcggtgcgtacgttgatgaaattcgggtgcgactggcggaaaatcggccgcaaaagcaggtgcatgaaaaactccgagaggacactaccctaacctaccgggaagaaagagaccggataagaggcgatcactgcatccttctctacatctaccacttctacagtaccattttccacaccatatgccccacggatccttgggaatacaatgggaatatcctgggaacctaccaccagtctcggactgatcagaggggtataaacttctgccccgcttgcgtccttctgctttaaccggatagaaatttttacactgcttgtctgggaagcaggtccgatataattgcttaaagagcaggtggtatcaatggaaccaatgtaataatggttctcttctgcctgtgcctgggtgcttccctcttcttccattttattgatcacataatcaaccgtggaagaaggctcaagaactgttccaggaagggcagactgggtcagaactgtaccttccggctttcctgcatcataatcataggtcacagtacctgtttttaagccagctgcctttaaaagggcatctgcagttacttcatctttgcctaataatcttggcacctggccctgggctgtttttggacctgtgctgactaccagttctactgtatcacccactttggcctgttccgggctgtagcggatgacctttcctgtatcaacgccatcatttgactcttcttttaaggttacttttaattctttctctataagaagcttctgggcatcttcaccggaaagctgttccaatcccaaagatgtaagatctaccttgtcgctgcccttgctgatggtcacgcctacggtgctccacttctcaaccacttcgccttctgcaacatcctggcgcattacctggtccggtttgtaattatcagaataatcttctgcttccacactcatcaccaggttgtattcttttaattttgcttctgccatatcctttggaagtcccaggacatttggcatataagtctggtcatctgccagggaaacattgatactttctgttggttcttcgctggtgaccacttctgtttccttgttctgatctgtcttggaccagaaaagcccggtcagtctggaaaatacaaaaatgaccacaactgccactaaaatagccgccacaattcccatgaccataatgatccgttcaaactgggtacttacatctttttcctttttctttacagttctctttttgtgagtaggctgttctggctgagatttttcctcatattcatcttcatccgaaaaatcctcaggttcttctgtttcatcttcttccggttccacttcctgcactgctgcttcttccacgcggcttctgcgccgtccctggatctgcgccagttcttccctggaaataggccgggttatggacggatcattttcctcatctgtctccagtccggatccataaatatcataatccggatctaccattacatgacgaagatctgtgatcacatccccaatagaaggataacgtctatccggctttttctgggtgcattttaaaatgatctcctctaaaccgcggcttaccattggatttaactgggaaggaggtgtaactgcctcctctaagtgagcaagagcaacagcaactgtattgtctccttcaaatggtactctgccggtgaccatttcataaagagtgatgccaaaggaataaatatcacttcgctcatcacagtatccgcctcttgcctgctccggcgaaatataatggacagaacctaccgctgtcgcattcatcgtctggctggatacagcccttgcaatgccaaagtctgctaccttgaccgttccatcttttgaaatgatcatattctgaggcttgatatcacgatggatgatatgctgctcatgtgcagcggcaattccctgtgccacctggatggcaataccaatggcttctttattttcaagaaaacctttcttttcgatatagttctttaaggtaataccctcgatcagctccataacgatataatgaaggtcaccttcgtccactacatcataaacattaacaatattgggatgggacagcctggctgctgcctgtgcttccattttaaatttactgacaaaattttcatcagaggcaaactcttcttttaacactttaatggccaccaggcggtctaaggtatgacattttgccttataaaccacagacataccaccggaaccgatccgtcccaatatctcataacggtcctgaagataggttccaggatttaacatgatcccatccctccttcctcaggttttaccagtacaactgctatgttatctgttccccctctttcattggcctcagcgatgagacgctgcgctttttcttttaaagacccttcagaaaggataatggaacatagggtatcgttgtctaccatattgctcagtccatcggaacacagaaggatataatccccctgttctaattcttcctcaaagaaatcaggcacaatatcaggacggatgcctgctgcccgggtaataatgttctttttccggttgtaatccgcgcttcctctctgcatcattcccattgccaccatttcttctacataagaatgatcccgggtgatctggcggatagagccgtcatggatcagatataaacggctgtctcctatattggctgcatacagaacaccgtcttcgatcacagcagccactaaggtgcatcccattccctgaaattcttctctctctaaagacatctcgtaaagggctttattgactgtttttatcccctcttttatctgggtaacacagggaccgtcatggcggtgggttaagtataccaccaggttttccaccatgaaacgggaagcataatcccccgccttatgaccgcccattccatctgctaccaggaaaagatccggcagggagcctactttttcaggggaagcgtagatataatcctgattcatggaacgaactcttcctgtgtctgtcagtgcatatgcttccatatcagatctctccttcctccagatagctctttcttaactggccgcaggcaccgccgatatcacggcccatttccctgcgcaccgttgcgttaatgccatgtttttccagataatttttaaactgctcaattgccttccggtcagattgaacataatcacgttccttgatcggattgaccgggatcagatttacatgaccatgctggtctttgatcagctctgtaagagccttggcctcttccaggttgtcatttaccccttttacaagactgtattcaaaggtaagtcttcttcctgttttttcaaaataataatggcaggcttccagtacatcctttaatttaaaactgtttgcgatgggcattaatgtctttcgcacttcgtcatttggggcatgtaaggacagtgccagtgtgacctgaaggccttcctctgcaaattttttaattccaggaacaatgccacaggttgagatcgttaagtttctctggctgatatttaagcccttctcatttgagatcaggcggataaagcggactacattatcataattatccatcggttctccggaacccatgactacgatattggacacccgctctcctgtaatggtctggatacggtagatctggtccagcatctcagaaggacgtaaatttcgctccatgccatccagagtagatgcacagaagcggcagcccatacgacagcccacctgggaagaaatacatacagaattcccgtggtgatactgcatccacacgctttcgatcacattgccatcttctaatcggaacaggtattttctggtaccgtcaatagctgaaatgcgctctcctgctacctgtaaagcggtaagactgtaattttccttcagtttctgacgcaggtccttggacagtgtgctcatatcatcaaagctttctgccagctttacatgtagccagtcataaagctgctttgccctgaaagatttctctcccagggctgtcatctctgctgtcacttcttccagtgtcatggactttatatcttttttaccttttgtatcgatcaggtctaacatatatttcaatactccttataatgtacgcttgaaaacactgatgaaaaagccgtcaaagtcttcaaaaggagaaatgcctggaaggatctggatctgaccatttttaaggtctgctcccggatatgtgttctctttcaagcccgcaaatgcttctccctttaatggaaaggcttctgtcaggtcttccggcttaaaaggaagattttctgtgatccaacgggcattttctgcattttcctctttattgatggtacaggtgctgtagatcagacgaccgcctggttttacgtatttccatacaacagaaaggatctctctttgcagctttgccagttcttttaagttttcttctgtggtgtgatatttaatatccggctttcttccaataattcccagaccggagcagggcagatccgcaatcacaagatccgctttattttcacttgcaggatcaaattctgttgcatcccactgaacagcctttacattgactgtccccatacggctggcattttcttcaataagagccaccttctggtatgtaagatcccttgcttccacacagccggtcccctgtaatttatctgctatatgaaggctttttccaccaggagctgcacatacatccataacatagctgtcttttttcggcgcagccagttctcctactaaagcagagctgatatcctgcacttggatccagcctttctgaaaagcttccaggctttctaaatagtcataatcagataatgcaagcatcgcctcaaaaccttctaccggttttgctgtagcctgctgtgccttcagggaagccaggatctcttctttggaagccagattaaaattacagcgcacccatacagggcgttcctttaagaaagattctgcaatcttttctgcattttcctttccccagtctttttcccacatggaatacatccactgcggaaggctgtaacgtaaatacggactggaaagatccagatcttccttatttcttgcaatggtacgcaaaactccgtttacaaagcctttcagcccctgaaaatggtggtgtatggccagtttgactgcttcattgcaaacagcactgtctggtacacggtccatgtaaaggagctggtagacgctcatccgcaggatattacggatgagcggtttcattttttctgtttttgtttttgaataactgtttatgatatagtcgatctgaagcagatattccagagttccttctgtcaccctggtgataaatgcccggtctggtttttccagatactggtatttgcttaaagcctgatttaacaccagatggacgaaattgcccttatccagtacctctgtcaggacacccagtacaatctcccggttttccaggcctctgtctatggcttttgccatatcatgttcccctttctagtcatttctgcgtctgtttccaaacaggagcataagtcttaaaagctgcagcagggatgctgcggctgcggcaacatacgtcagtgccgctgcatttaatacctgtctggtctgtcctacttcccggccctctaaaataccgatggagtcaaggagcgctaccgctctgtgagaagcattgtactctacaggcagtgtaatgatctggaacagaacagccagtgaaaacataaggatgccaagattgatcagtccggttcctcctaatacgataccaaggatgatcaggagccatgagatctgggaaccgaaattagctaccggaactaaggctgcacgcagtcttaagggcacataatctcttgcatcctgaatagcatggccacactcatgggctgccacaccaatagctgcaatagaggtagaaccataaactgtatcagacaggttgacagtcttgcttcttgggtcataatggtccgtcagtcttcctgatacatggcgcaccgtcacatcataaattccctgggactgtaaaatccgctgtgctgcctgggcaccggtcatgccgcagcggctggctacggaagaataacggccataggtagcatttaactttgcagatgctcccatagaaaggagcacgccgatgatgatcaggacataagttgggtcaaaataatacataggcatgtagccgtacataagatcactctctttctattccatacagtgatggttgtgtttcccacaacaggatctttactcctgatgtcccaggatctctcccggtgtaatagtaaagccacgcagcagtgcatctgctgccatacgtttctttccttctaactgaagttcattgatctttaaaattccctctcctgctgcgactgtaaatccatgtttgtcagcctgaaggacctgtcccggaactgcatctgtaggaactgcttcctctaatacatctgcatcccagatttttaaagtctttccattataaaaagtataagcacttggccatggatttaagccgcggatcagacgctcaatggctgtggctgacatggtccagttgatatcgcctaaagtctttgtaagcatctttgcatagctggtgcctgactcgccctgaggagttcttgtaatagttcccttttccagtttttcaagggtagacaggatcaatggaccgcctgcttcacttaacttctcaaataagctgccgcttgtttcctttggatctaaggggatcacctttgtctctaagatgtcacctgtatccaggccaacatccatcatcatggtcgtaacaccggtctctttttcgccgtcgatcacagcccactggatcggtgctgcaccacggtattttggaagtaaggatgcatggatgtttacacagccatattttggcagatccaggatctctttggataagatctgaccaaaagcgataacaacaatggcatctggtgcttctttctttaatacttctacaaattccggtgtttttacctttacaggctggtataccggaatgccatattctaaagcctggatcttaaccggagtcatctggacatcttttcctctgccctttggcttatccggctgtgtcacaacagctgttacctgatgccccgcttcaactaatgctcttaatgccggaacggaaaaatccggcgttcccataaatacaatacgcatgtatatttctcagtcctttcaaaatcggcgtttactcttctgtgatcgtttcttcactttcagtttctgtatccatcagttcgccctctaccagttcagtataaagctgaccgtctaaatgggcacattcatggcagatggctcttgcaagtaagccttcgccttctacttcgatctcatccatgttctcatctaacgctcttactactacatggtttggtcttgtaacaacgcctgtttttccaggaacgcttaagcagccttcataaccggtctgctccccgtcctgctcaataatttccgggttgatcagtacatactgatatccgtcttctacatcaattactacaattctttttaaaatacctacctgtggtgcggcaagacctacaccgtttgcctcatacattgtctcgaacatatcttcgatcagttcttttgtacggtcggtcatctctttcaccggtttacatttcttatttaaaatttcatccccaataacgcggatctgacgaactgccatttttatctctcctttaaatatcgtaattaagtcaggtcagactggaaaacaacactttcaagcccttgcgcttcttttaagcattgttccgccattttcctgatgtgtatcagtatatcatagttttcctgctttatatataaaatttttctataaatatcattaactttgaacaccggagcatttacagggcctataaactggatcgttccatcctttgacagatcctcattttgcccgatccactgcttcagacactcttccaataacgctgccgcctgttctaatcgtccctcatttttatctgcgatctggatggttaaaagccctactgctggcggatatccaagaagtttcctgaaattcatctcctgggtataaaaggcttcatagtcctgggccgcagctgtctggatgctgtaatgatccggctggtaggtctggatcaccacatttccagctgcatttccacgtcctgctcttcctgctgcctgagtcagaagatcaaaagtctcctcactgcagcggtaatcactggcatagagggaaagatccgctgccagagcacctaccaaagtgacttttggaaaatcgtggcctttgacgatcatctgggtgccaatgaggatatctgcttctcctcttgcaaaagcagataagatctgctgatgaccgccctttttagaagtagtatccaggtccatgcgcaggatccgggcttttggaaacatcttcgtggccatctcttctattttctgggttcccgtaccaaaaggggcaatatatggggagccacaggatgggcatgttttcggctggcggatagtataaccgcagtaatggcacatcatccggccgtctttgtgataggtcagcgtcacatcacagtgaggacattttaccgcttccccacaggatcggcaggacacaaaagttgcatagccccgtctgttgataaataacatggcctgctcccctttttccagacggtcttctaacagttcttttaatcttgcgctgaaaatagaccggttgcccgcttttaattcttcccgcaggtcggcgatctccaccgtaggcagaacagcatctgctttggcacgtctggtcagcttataaaggtcatattcccctcttactgctctggtataggtttccaaagaaggcgttgcagagccaaggaccagcatggctccttccatttctccccgttttcttgccacttccctggcgtcatatctgggagaaagctcacttttataggaattttcatgttcctcatcaatgatcaacattcccaatcgttcaaagggcacaaaaagagcggatcttggacctatgataatatcaatatccccggttctggcccgttcatactggtcaaagcgctctcctgcggacatccgggaatttagtacagatacccggtccccgaaacgaagataaaaacgcatgactgtctgccaggtaagggagatctccgggatcagaaggatgacctgctttccagcccggatcacatgactgatcagttccatgtacacttctgtttttccgctgcctgtgataccgtggataagacatggttttcggtccccattgtcatatttttcacagatattagctgcgatcctttgctgatccttatttagaacaggcggtttccactgggctttagaagcgtctgttaaaaggcggcgcatttcctctaagggattgcggtactggttcaccacctggactgcaagaagtcccgcctgttccaacggccggatggctgccgccgtcaggttcagcttatgaagggtattttcataaggaaggtccggattttcttttaaagcatataatagtcgcagacgggccttgtattttttccgctctgctgtctggatcgcagcttccagagtcagcgcatccaccagaagatggatcttacgcttaggcgcttcccgcaccttttgcttcaccggaagcactgtttttaatgcctggttcatagtagaaccataccgttccttcatccaccatgccaggtggatcagctgggactgggcggtaatgcttccttctaccagagagtcgatttcttttattttcgatatgtcgtattccgtctggttggtcaactccaccacatagcctttgcgtttatggctgcctgcgccaaaaggaatatacacctgctgtcccgcagtgatctgccctaaaaggtgctccgggatgcggtactggaaagtcttatctacgctttcgtgggatatgtcgatgatgatatttgcatattgatagatggttggctgatatattgtatctgttttattatctgtattataattcaaattctgtcacctgattttaggctttctgcattttctggttgtttccgtaccttttattgtaacagaaaatgaagttcatgacaacgcaaacagcctgaagttcatcgtttttcacgactttcttcaggctgtcttactggatcttatactttttatacttcttatacttcctggtacgttttataattcaggtaatctctctgcctctgccagatccagcaatttttctgctatctgtttttcttttcccggatagcagatcttaataagattttctgcctttttaagtatctgcgcttttgtaagagggtaattctctcctcctgacggatcagatacctgtgtttccagaacaataccattttctaaaatgaccttcatagaacatccccaatgagccggatatacagccgaaaaagcttcatccggcatcaccgttactttttctataaggcattgcatagaaggatcttctactgtctgatctgaaaactcgctcatagtcacttttccaaaaaggaatgctgccgctgtacaaaatggaatggaaaactttgcatctatggtattttgcggatgtaaacagccatcactgactgcacattgcttatatcccacttcataggtcttgatctcaatctccctgatagcttctgtcagcctttttctctcttcttctaaggtcttatgatcgtactcttttccaattttttccaaaatactgtctcttaatttcagactgcaatctatagcacaatgggcactgcggcagcagggatatggcttcatatccatatgaaggatctcccaatctataccaagacctttactgacttttactatatcaccagtatcagacatagccgccagtaaaccgccatcctctgcctccaaaatatgctccggtccggtcattccggcttttgctaaaaatgctgcatccagaccatttacaaccgctctggccgggtggagcactttgcaggtgcttccatcccctaaaaaggcccatctgccaaaactctgggttcctgccatcccaagagccgataccagctcatctgcattcagccccagaagctttccgcaggcagctgcgcagccaaaacctccgcaggtagcagtggcatgccagcccttttttctgtgacttgttactcccaacgccataccgatccggctgacggtttcatagccacataccactgctgtgagaaattcttttccagaagcatggacataccgggcacagctccatgcagccgggatcaggctggcgcttccatgtgtttttgacgccggatggacatcatccagttccagagtatgggccagcatggcatttatataagcagctgtagaaatatccgtttctccttcgcttccccagatcttaccgcctgttccgttatttctctctaaataagaagcttttacttttttaaccagcggatcatccacagctcccaaagcagcgctgatcagatccaggacccggaaagatactgtggtttttacttcttccggcaggtcatcccagctaagtttttctataaactctgccagtttacgcatctcacttttctccataaatgctccttctattcccttactctttggatctttttgggatatcatcttgcttttacttcttattatttttcttccttataaaagttgatcagagaacctgcaagaagtaccttcttttctgcttctgttacatttttaagttccagttccattggtctggtgcttccatctgttccgatcaccgtagctgttacctttgtggctccttcttctactgctttgcggatgcctggaagatatacatattctcctggttccagaacaatttccttatccggattggtaaatggcagaatgccccagtttacacagttgctgcggtaacgcttggttgcatactcaatacagatattggcaagtcctccaagaaccttctggcagctggctgcatattctcttgcagaaccgtcacctgggcgttttgcataaaggacagagccaattcctgtagtcttcatcagctcctctgtatctgctgttactcctgctgcttttaatacttcataaacttctgctgtcttttttgcatccccgtttcttctggctgtttcatattcctgaatggcttttgcatttcccacatagtgaggatccttgcggatcagtgtaaattcagagatcttatatggattagagcgataggatgcagtttcaccagaagggatcagttcatcagtagtagttacttcatcacggatcacgctggctacctgaagcagtaagttgtctgtaagggcaaccatctttggccaatctttaatggaaggaccataaacgatctctgtctcaggctttggatttttatagccgttgtatacaatattcttataaatatcactgttaaaatgatactctggagtgtaatattctaccggcacatcttctgcggaagtcagataaccgccgttaaatgcggttgctgcaatggacttggagtccataagcgcaacggaagcgatctggcccgttgccggattggagccttcacggttggggaagtttctggtactgtggcggatgcagaaatcattatttcccggagcatctgaagcgccaaagcaagggccgcagaaagcggtcttcactcttacgccgtaagtcatcaggtcatttaatacacctgctttatttaactcatacatgatcggctgggaagccgggtaaatattaagcgggaatgttcccaagcctttgtttaatttctttgcaatggtatctactgcacagatattttcaaaggatcctgctgcacagccggcaatagcgccctggtcaaccttgatctttccatcatggatcttggaaagcaggtctaaatggatatccgggttgttctcaaatacacgctttgcctcttcttctaccatagacaggtatttttccggctctgcgatcacatctgccagaggatatgcattgcttgggtggaacggaagggcgatcataggaacaatggtatccagatcgatctctacgataccgtcataaagggctgcatttcccggcaccattttcttataatcatctggacggttatggatcttaaaatactcttctgtcttttcatcggtggaccataaagaagaaaggcaggcagactctgtagtcatggtatcaataccatttctgaaatccatggacaggctgcttacaccaggtcccacaaattccaggactttattcttaacgaaattattcttgaatacttttccgatgatgcttaaggctacatccataggtcctacccatggctttggagcacctgttaaaaatacagcgatcacttccggataatcgatctcataatactttccaagcattgcctttgccagttccgggccgccttcaccgatggataaagatccctgtgttccatagcgggtatgggagtcagatacaatagacatatccccggacttcacgatcatttcacgcatatactggtggatcaccgcttcatgaggcggtacaaaaatgcctccggattttttacaggctgactccgcatatttatgtacatcggtattaatagtgccgcctactgcacaaaggcagttatggcagttggtaaatacacagggcattggaaattcctttaaaccgctggcataagcagtctgaaggatacctacataagtattatcatatactcccatggagtcaaactgaatctgtaaatgttccatattatcagaatggttatgcttctttaacacctggtaagtcagtgtatttttaaatgcctcttcctgtgagatagctactgcttcttcttttgatgcaatcctcttattatcaataatgatctgttttccgctgtgtaaggtgaccatactcattctccttttcttctataatttatatgtattaacatgtcctgatctgaaattatcccacatcttgtactaacaggttttccatgcaatgcacaccggactttctgtagcgatcttccttcctgtatctttcaacgttccatcttttaggatctcaaaaacagtaatggtatcagaaagctcatttgctgccaaaagtctggtgccttccgggtttaatgtaataaatcttggctgctctccgcctgttttgatattctggatataagtcatatttcctgttgcttcatccagatgataaaccgtaatgctgtcatgttttctgttggaaacatacagtgtatgaccttccggatggatatcaatggcacttgcccagccatctcctgcataatcttccggcagactggtaagaagctgttttaatgccagcttacctgtcttttcatcaaaatcataagctgctacggtactgtctttttcatttacacagtaacagtatttatttcccggatggaacacgcagtgtcttggttccgcaccggtacggcctttctggataaatgtttctttcagacttccctgttcttcgtcaatggcaaacacggtcagtttcccgactccctgcagtcgcccctgggaagggaccaccagccagcgtccgcttctgtctttcatggtctggtgaggatgggaaatatagccgggaccgccatttcctgaaataaattccaggtcatgaagttttcccaaagatccatcttcaaggactgggatcacagatacgcttcctgtctggagattggctacataaagccatctttcttctgggtctaatgtaagatgcaccggattggtaccatatgtttttactgtattaaggtactctaaggtaccattttcccggatcttaaatgcgcttacctggcaaaaatctccatgtatgctgtacagacggtcctgtgctttattcagacagagataagaaggatttacctgaccttccaggatctgtaccagctcccagttatctccatcaaccttgtatacactgatcccttttcctctggcttttcgctcttttgtggtacggcagccaatatatgcaaatttttccattttcatcttccccttttgtattatgttttcttaaaatttatccaaggaatttaagcagtccggctaaagtcagaacaaacaccaaagctaccattccagcagaaagcataaataactgtccaaataatttctgctgttctttctcatcacagccagattcctgggtgtaacttgccatgatcaggcttccgcctgtagacagaggactgatacctgctaccgtagcgctgcatacgatggctacgatcatctgcataacagaggcaccgcctacctgtgctgaaatatccggaacggttgggatcagcgttgggaatacaactccatttgcactggaaaaccatgacatcagaccgcctgtaaatcccataagcggcgctgctgtaacagagttcataaaagatgcaaggatattagaaagcaactcaataccgcccattgtctgggtaatattcatcagtacgctgacacctgcgatcaggatcagtacattccatgggatcatcttgatcgctttcttctcatctgcagttctaagaaggataagaacaagtgataaagtaaagcagatcagtcctacatcataagaaaatccaactaccataaccaccatgatcagtaatgccaccaggctgatggtctgttcttttgtaaaatgttctttcacagcagcagcttcaccggcacttcttctcagtttataaccgcctaaaacaatataagtaacaactgcacaggcaaagttggcaatggaaactccaataaacatgttcattccaacgccttccatattcatctgtgccaaaagatcatttacaatgataccggtcagtgcaataggtgatgctgtgcctcctactgctccaaggatggccattgctcccataagcaccgggcttgcatccatctgtactgccagtgatacagcaaacataactgtgactgactgtacgctgatagcaccagggcctgcagcggaaaggataaaacttacaagataaataataaccggaaccaggaatgtattatttccgcagaagctgatcagctttttggaaactttttccagtgttccgttttgctgcagcaaactgaaaaataacatggttcccaacaatgtgctaaacagtttatacggaaagccgccatagatctttcctgacgccattccccctatagttcccaggatcagtgccagtccaaaacagacaatacctacattcatctttcttacaaatcccaatatgatcgcgccaaccagacaggccagtgccaatacctgtaatcccatatgtaattcctcctgaatgttaaaacatttccccaattatcttatttttatgaagttacttcagatcattctcttatgtatacaaagccatccatgatccttcttgctgttcttgtaacgccgccttttaacaccttttctccatccatcttaatatctacatccgtaataccgctggaatgtcccagacggatgatatcaccctctaatggagcttttaatgtttcataaacgatggttccagggatccttgcagcagcacctgttcctacagctactgtcataggatatgccttatgcagggcacctacggagattgctcttacacacagatccatatcttcggcctttacttgatttttgtccatatctgtgtaatcctgaggcgctgatacaatggatacctttggtgcagaagtagatttcgttctggcatcttcccatttttccacaaacccgcacttaacagctgccattccacggatccgttcaatatgttccataacatctgcattctggtttaattccaccagttccgttcctttaattcccagatccgatgccttgataaataccataggattggagcagtctaaaaccgttacctctgccggaccatatcccggtacatcaaaaatctcttttttctgtcctgtggggaagagctttcctgttttagaacctgccggatcttcaaaatacatatcaatacgggaacctgttccaggaacacccttgatcacttcatccccatacacatctgcatggccatcttttacacgtacatgttcttcaatgatcttgttggtattggtatttaaaatacgaactactgtgattggctctacagccggaaccaggccctcatcaatggcaaatggacctacagcagatgagatatttccgcagttggcgcttccatctacccttggaatgataatgtctacctggcggaatgtataatttacatctacatccgggcggtcggatttggaaataatggcaaccttacttgtagatgatacggttccgcccattccatcgatctgttttacatccggggttcccatgactttcataaaaatgtcatcccagagactctgatcttccggcagatccttctcatggaaaaatacggctttgctggtaccgcctctcatgtaaacacagggatatttcttcatatacataaaacaagtcctcctttatattgatttctatacgtttttctttgtttaactgtattataggccttgctatccattctgtaaaattgtataatttcattatattacattccattatggaatggtttatgtttatggaaatttgcctgacaggaggttggtttatttatggatgaacaggatattgaacttttaaaaacattgatcgatacacagaatattacaaagacagcaaagaagctttataccacccagtcttctctcaccaaacgaatccagaaaatggagcaggacctgggatgccagctttttatccgttcccgcaaaggcattctccctacacccgctgctgaggggatcttcccggaaattgaaaagatctcccagtccatggaacacatacgggcctatgccctttcgctccagggggagatctgcggttctttaaagatcggtgtttctgttaatattgcccggtataaacttccagctgtactgaaaacatttatgaaaaaatatccaaaagtagacatttatgtgactacaatgcaaagtacccagttataccgtgtactggctgataatgagatctctattgcattggtccgtggcaattttaactggcaggatggggatgttatcctttctagagaaccggtatgtctggtacgaaatcaggaaatggctgaactctccttaaaggatatcccttatatcggacgtcatacggactctcctttttacgaccgcattgaacagtggaaacaggaaaatgggtgtgccaactgccgcacccagctttggatcgatgatatttccagctgcctggaaatggtggaaaatggtattggctggtctattttgccggagatctgtttaaaaaattataaagggagcatcacgccccttttctttcaggacggatctccctttatacgtacttctcatattttatataaaagccattattttgaactccctcaggtgcgggcctttatacagactgtgcttgctgaggaatactttaatgcttaaatacagcactattttcccagtacctctttccccagagaatcagcagcaaggattgcatcgtaaagctgatctgcagttacatctgctaccatattatgtatggattcgccttctacacaggcatgctctgcaatgacctttacctgttccttggttgttacaccaatttcttccagagtaacaggaagacctacttcccggcagaaatcctgaacttctttaaactctgcctttggagcgccctctaatatcagctgtaccagagtaccataagcaacgcagtttccatgtggtgcactgtgtccgcctaaagctgtcagaccattatagaatgaatgggcaacagccagaccgccattatcagcgcctacaccagacaggtatacattggcttcgatgatagcatccaacgctggagtaaccacctgattttcacaggcatgttttgcagctgcgccatactcttttaaagtctcatagcaaagtttgcacagtgccattgcagatcttgtaataccaccaaattccaggcttggcgcatcggtacgctgacatgctcttgcttcaaaataagttccaagagcatcacccatacctgctaccaaaaatttaacaggcgattttgcgatcacatcactgtccacaataacagcttccgggttctttggataaaataaatagctgttaaatgtctcatcatcattgtaaataacagaaagtcctgtacatggagcatctgtcgcaacgactgttgggataattaccaccggaagtttttcataatgagcagtagcttttgctgtatcaatggctgaaccaccgccaacacctactactacattcagtctattttcgcggacaatttttctcatccgttcaatctcaccaacactggatacaccaccaaaaatctcatactggcggatatcttctgttccttcaaaactcttctcaatcttatcatggcacattttgtatccacttcttgaacagacaaacaagaatttgtttccaagatctttcatttcctcatggaatttaaacagagaatcctttccctgtacatatttctgcggcgcacgcatcattctcagtcttgccataataattacctcctgttttcacattattttgagatcattagtttgttaatttattatcacatgcatatattatactaccagtcaccctaaaatgccaagaaataatttacatagaacatgtacaaaattttaaacagaaatcctgtttgcctcttttacatactaacctggagcttctgcataataaaaaagacagctgcaccaacaggtatgtcctgtatagctacctctgtctttttcatattactgatatttacttacttccaagatctcctctgccttctttacttcttctgcagtaggtgttctcacaccatccaaagtataaggaattcccagtttctgccatttaaacagtcccagtgtatgatatggaagcacctctacacgtttgactgtctttaattcccggatcagatcacgggttcttaccagttcttcttcgtcatcggtcagatccggcacaagtacatggcgcagccacatatcttttccgtggtctgacagccattttgccatctgtacgatattatcgtttggacatccggttaattttttgtgtttttcgttgtcgatctctttaaaatcaaggatcaccagatccgttactttcatcagttcttcaaatttgctgataaatggttcttccagtgtaaaaggattgcctgctgtatccagagctgtgtgaactcctttttccttggctttcttaaaaaactctgtaacaaagtcgatctggagaagaggttctcctccgctgacggtaataccgccgtttggctgtccttttttattccagtaactcttataacggtacacatgggaaaataatttatctgcagtccagggagtacctccctctaatttccatgtctccgggttatggcagtaacggcaccgcatgcggcagccctgaagaaatacaacgaaacggacacctggaccgtcaaccagtccaaaggtctccatagaatgaacaaatccttccacgtccttctccttattttctgaaaatgcattccataaatatttataacggtccagaacataatgtcctgaaccgttacatcattatatggatctttgatcaatagcggaatgctattttatttctcagttacattaaatgcagcctgtattaaattacatggttgcatggcaggttctggagataacgtccatctgctgctctcttgttaagtcgatgaacttaacagcgtatccagatacacggatagtgaagttagcatactcttccttctccggatgctccatagcatcgatcagcttctccttaccaaatacgtttacattcaggtgatgagcgccctgatcgaagtagccgtctaatacctgtaccaggttatctactctttcttcttcgctgtggcctaaagcatctgggttgatagtctgggtattggagataccatccagagcccactcgtaaggcagcttagctacagagtttaaggaagccagtaagccgttctgctctgcgccgtagcttgggtttgcacctggggacagtggctcgcctgctcttctgccatctggcatgcttccggtagccttaccatatactacgttggaagtaatggtcaggatagaagttgtaggctcagaatttctgtaggtgtgacgtctctttaacttctcaaggaaggtctttaacagccatacagcaatctcatctgctctgtcatcgtcattaccgtatcttgggaagtctccctcagttacgaagtcaacgatcaggccagtctcatcacgaacagtcttaacctttgcgtacttaatagcacttaaggagtcaactacatgagagaaaccagcaataccggtagcgaatgtacgtctgacatcggtatcgatcagagccatttcagcagcctcatagaagtacttgtcatgcatatactggatcaggtttaaggtatttacatatacgcctaccagccaatccatcattacctcgtacttacggatcacttcatcataatcaaggtattcagaagtaattggtgtgtactctggaccaacctgctctttggacttcatatcacgtccaccgttcatagcgtacagtaagcacttagccaggtttgcgcgggcaccgaagaactgcatttccttaccggtctgggtagcagatacgcagcagcagatggagtaatcatcgccccactctggcttcattacgtcatcgttctcatactgtacagagcttgtatcaatagagatcttagctgcatacttcttgaagttctctggcagtgcagaagaataaagaacagtcatgtttggctctggggatggtcccatgttctctaaggtgtgcaggaaacgatagtcggtcttagttaccatagaacgtccgtctacgccgataccaccaacttccagagtagcccaaaccgggtcgccggagaacagctggttgtaagatgggattcttgcaaacttaaccatacggaatttcattaccatgtggtcgatcagctcctgagcctgggactcagttaagatgcccttatccatatctctcttgatgtagatatcaaggaaagtagagatacgaccaacgctcattgcagcaccgttctgggtcttaactgcagctaagtatccgaagtataaccactgaacagcttccttagcagtcttagcaggctgggaaatatcgtatccgtaagatgctgccatcttcttcatatcctttaatgcctgatactgtctggagatctcttctcttaaacggatcacgtcatcagtcatagttccgtcaccgcagttagcaaaatcatttgccttctcttccatcaggcggtcgataccgtacagagctacacggcggtagtcacctacgatacgtccacggccataagtatctggaagtccggtaatgatcttgttgtgacgaactttcttcatctctggagtgtaagcatcaaatacgccctggttatgggttctgcagtactcagtgaagatcttgtgaagctctgggcttggctcgtagccatagttcttgcaagcttcctctgccatacggataccaccgtaaggcatgaatgctctctttaatggcttgtctgtctgcagaccaacgatctgctctaagtcctttgtctcttcactaatatatccaggtccatgagaagtaataccagatacgatatcagtatccatatctaaaacgccgcccttagcgcgctcttccttctgaagtccctgcagaattccccaaagcttatccgtagcttcggtaggtcctgctaagaatgatgcatcaccgtcatatggtgtatagttcttctgaatgaaatctcttgtattgatctcttctttccagagacgaccttcaaatccgtcccactgttcgtagttaaacatttccttcctcctgtttttgtattccgcgattgttagtttttcttaactcaccacgaatgatatcatattttcggagaaaggcaagtgattttttgataaattttatcttgtgttaaagaaaaaacaatgtttgttttttggcgcatacaatcagagtttatgcggggttttaagggtgattttgtttgggaaaatgtgcaattttagccattatcaagttccctcttccagtaatttctttaaacctaaaaatgacattcatccatattgtggattctcattctttttaaataatgtatctaactcaaataaaaatcacgttcagcacttattgttggcaaatcctggaacctaaccgataacagttcaagaaaatttattatggttcaactaccagaaactattcaaaatgcacaatatagtaatatttgtgaaattggtgaagagcgtatccgtcgtgctggaaagaagatcaaggaagaaaatccgcttaccactactaatcttgatatcggcttccgcgttttcaaaatagacagcagtaatatggaagatgtctactaccgccctgccgattacaatcagggacagatggaactgttcgctgacaatatcaagccggatcgtacaccagaagatctgctcttccaggtaatgctcgaccttggtattttgctctcctctgacattcaggaaacagaaattgctggcaagaaggtgttctctgtagcggatggttatctgattgcctgctttgacaaggatgttacagaagaaaccgtcaaagccattgcgcagaagcagccagtttatgccgtattccgtgacagcagtatggcgagtgacagcgtagccacaaactttgagcagatatttgaaacctatagtccgagaacgcaaaggaaggtgctgtaatggctgagatgaaattcaaatttaccatacagccttaccagaccgaggctgtggacagcgtggtaggtgtatttgctggtcagcctttcaacgaccacttcacctaccgccgcgatgttgaaatcaagcgagatgtgacaaactggatgccttctgatgaagaactgtacatgggctttgccaacgctaaggtacagctcgattacggtcagcttttggataatattcaccgtatccaggctcgcaataatattaagctctccgattctctgaaatccggagggctgggtgtatgctcccatggaaacattaaatttgaagcctattgaaaaagcgaaaatcgactgtgccataaagctgtttcacaatttctcctctgcagatgtggtttacgacagtgtggacagctatcagcacctgttagatattatgaacaagctataaaatcgcataaaaaatgcacacccgcataacgaaatattctgttcatcgttacggattagataaatcgttattcttgtatctacctcttctgataattacccttgcacgaactgtatctatatttctgttctgagtcaattcgtcaatctcatctgcaatattttccgcaccatcaaagtctttcaattcaagcaaggaatacatttcctctgttttttgtttaatgatcgcacttaccgaatctgtttccattttgtcttccaaaatagaattggaatccataccaaacatccccgttgtttgtaccacctgaatatccgatccgttcctggataaagcataaacattaaaatcgtgatctacctcccccaggatctgaggtgaatgagtagtaatgataaactgaatattaggaaatgttttctttaacatggaaataactttccgttgccaggaagtgtgcatatgaagttccaattcatcgattagaaccacaccatctccctgaagtggatcatccaatgacggatttgcaatcgccaagcgtcgtgcaatatctccaaataaagccagtgtgcatttttctccatctgaaagctgcaaaacatccagatttgtaaccatttcatacaactctcttataaggtctgcatctgccttttgatccactccatgatcacatctaccacatatttttgctctgtttctgtcagttctcttccctttggaatgtgatgccatttttccagacaactgcggcagcaggtaccggtagcgtgttgcccgataaatacaggatgacctctcattggtgtctgttttccatcatttttcggctctgcaggtgccagcctgtcacggataaaatctgtggcatggcttcgcactgtatccatacctttttctattacataatgcctgtcattagcctttaatgtgaaactgctgcgaaatttcgactgggaaaggcgtttccagaggttgccttcgtaggcggccggtgtttccgataccatagacggctggatactgtttttgtatacgatcattttttctttttgtgctgaatttggtttttgcaaagctgttccgtcagcccccacagtttcttctccctggaccagtttttttgccagtgccgctgccacagcccgcgactcttcactttccggctgtagccgcttcgccagcttcgtatttctccctgctgttgtttcattgcggatggcataaaaaatggctttccgctccccgatcaataccagtatcttcttcgcccttgtaacacctgtatagagaagatttcgttgcagcatcacaaagtgactcatggtaaagggcatgactacaatgggatattcgcttccctgggctttgtggatggtgactgcataagctaatgacaactcatccagttccgtcacatcatagactacctttcgcccatcaaaatctaccgtcagttcccgttcttctgtatccactttgcagatagtcccaatatccccattaaatacttctttgtcataatcgtttctgatctgcattactttatcattcaaccgatactgggtaccaccccggcgcaggcagatatctgtaggattcatggcttcctgaagtatctggtttagattggctgcgccgcactctcctctttgcataggcgtcagcacctggatatcctgaataggatctacatggtaataccgtgggaggttttctttgcaatactgaaccagcgttgccacagtttcttcgtttgtctgcttttccgcaaagaaaaagtcggaatttttgccgccccgcatatcaatagcttcccctttatttatcctatgggcgttcatgataatacggcttccctgtgcctgacggaagatcctggtcagacgcaccaccgggatccgctcagaattgatcatatcacggagcacatttccagctcctacacttggaagctggtcaatgtcaccaactaaaaccagagacatatgttccgggattgcttttaacaggttgtacataagcatgatgtccaccatggaacattcgtccagaataagcacatctccttctaaaggcttgtcctcgtttttctggtatccttccggcggcttatattccaaaaggcggtgaatggtctttgcttccatacctgttgcctctgccatacgctttgccgcccgtcctgttggagctgctaaaaggatcttataaccgtccatcttataggcagatataatacccagtgtggtagtggtttttccggttcccggaccgccggtgagtatcatgactttggaagaaatagctgttcttactgcttctaactggatctcatcgtaggtgatctgcgactgagataccactttttccagtgttttttctgtatcaatcacagattttcgtccggtaagcaaaagttccagcagccgctttgcgcaaccgctttctgaaaaataataaggcggcagataaatggcttcttcctcctggatcacgtccttggtgcgaagcatctcatctaaggtaacttcaatttctccttcttctacttccagaagttcttttgccttttttaccagctgctcccgttccccataacagtgaccattttccgccagtttatttaaggtataaaaaataccactgcgcagacggacaaattttgtcttgtcaatgcccattttctccgcaatggaatcggctgttttaaatccaatgccccagatatcatctgccaggcggtatggattttcttttacaatggaaatgctttcacttccataggttttatagatcttggtagcatgggaagtgctgacttcgttgctttgaaggaacagcataatatttttgatctctttctggtccttccagctggttttgatccgttctgcccgcacttttccaatgccgggaactttgatcagttcttccggtgtctcatcgataatatccagcgtattttcaccgaatttttccacgatctttcttgcaaaaacaggcccgatccctttgacaagaccggacccaagatatttttcaataccatatacagtggcaggaagcgtttcctcaaagcgctctgcgcaaaactgcctgccgtatctggcgttcattttccagaagccgtctaaagacaggacagagcccacatgggtatccggcatagtgccaactactgttaccagatcactatagtttttcactgcgcattttaaaactgtataaccattttcctcattttgatatgtaatacgctccaccacgcagcgcagatgctccatgtatttctctccttatccttctcttctgacttttatgatagttaataatcaatagtataacacacaaaaaatgagccgtctatgcgactcacattttctgcaaaacccagtatcccattcccaatatccagcttactcccacgccatacaggatcacaggcccggcgatggtaaatatctttacaccgataccgaaaacctggccttcggagcggaattccactgcgggagcagctacggaattagcaaagccggtgatgggtacaagggctccggctccgccgaattttaccagtttctggtaaatgttaagaccggtacataaggcgctcaaaaataccaggataatggaagtccaggcacctgccgcctctgcctccagcccccaggtatttgtcacccggttcataatcaactgccccagagtgcatatcagtccccctgttataaatgcttttcccatagaatcccaaagattatggaccggggtgatctctttaatgtagtccgcatagtttttcttgtcgatctccatgttcttttcctttctatgaccatgttgaaaccacttttttcattctcatcctgctgccatccgcctccagaaatacagcagcgatccgccacatttccctgcagcaatagcaatgatcagccatggaagccccacagacagccggatccgccttgaaaatgtgggaaatgcttttaaggtttctgccagagacatggcaagacagcctgtaaatattcccacgctgacgccccctgtaagaagaaagatctgcccaaacacttcgcctaagggcagtcttaccttataaagctccatgatatttcccaatactcccccgagaatgatcatattttcatagagcatgatatttttctttgtcttcgttttcccgatcagccgcacaaaaacaccgatgatggccagaaatgcataaacgccggctgcaatgatcccgccggaacaaaggccgaaaaaaaggagaaagatatttttaatccacatcgatctctttctcctttctacctgcctggtcgatcagggtcttacagatattttcttcataaaggcgcatttccacttccaaaggtgtgggatcggtattcagctttttcactgcaatatggttgaaaaataccaaaatcccaatagcaagtcccacactgtatcctgcttccatcagcccaaaaccatctggctgccgtcccatgacctgaaagtagacctgactgagtacatcccctacatttacatcattattaaaggtcataatagcaaatgctgccccgaaaaagctgaccagacacacaaagactgtttttatccactgccagcaaacttccgaagcctttggcggcttataggcgatgataaaatccgactctcccaggttgtttacctcaatggacggatccaatgcctctaacatccgcactacttccagcgcgctcattacataacgccttgcttctttttcagggatactctttacttttaatgccctgcatttacttaagatcaccttatcccggcaggtcacttcccctacatcctttaaaaatacatccctgcggcggagctccgtgatctggtttaactgtatatagacggtctgactctggctgctgcctgtctggctcataggttttcactccacccttcgccattttcttctatcagcagactggccggcgctgccgcaaaagccggaattccggtttctgtcatgttataatacgccgttacctcattttccaccagcatcccttctttttcatactccggttccctcatactccacaacagataccctgtgaccatacctgctaaaagaagaagaaaaataagaactgcttttacgcttttcattttcatctgaaactcacatcctttcacagctagaatgtgcctttttttcatttttattcgtttttatccgtttattttatccttcaaaacgctttcgcagttcttttaaacactttttttccaggcgggaaacctggacctgggatacccctaacgcttttgcagtttccatctgggtctgattataaaaataccggcgcaggatcagttctttttcctggggtgccagatctttcatgactttttccagggtaagcctgtttaaaagctgttcctgggcctcacttttttcttctaacttgtccattaaaacacctttttctccttctgtggcgcttaaaggcctgtaaatagactccacctgggcgcctgcctccagggaagcggctacttcttcactgcttaccccaagcttccctgcaatctcttctacggttggatcccgtccataacagtccgataattcttcttttacaagaaatacttttcctgccagttcttttaaagaacggcttaccttaatcatgccgtcatcccgcaaaaatctccggatttcacctgatatcattggtactgcataggtagaaaacctcacctggtaattcaggtcaaatttatcgattgccttgatcagaccgatacttccgatctgaaacagatcttcctgttcatatccacgacctgcaaagcgttttacaatgctccatatcagtcccatattgtctgttaccagcctgtccctggctgctttatctccctggtgagctaattcgatcaatttcagggtctcatccataaagcttaccttccaatatgttttttcatggtcactgctgtcccttttcccggttccgactccacggtcacttcatccataaacgcttccataaaggaaaatcccatgccggaacgttccccggtggtatccgttgtatataagggttccatggccttttttacatcctggataccggctcctgtatctgtcacacagacggtcagtgttttttcagctggatcagccgtcatatctaaaaatatctctccaccttcttttccataaccatggataatggcattggtgactgcctctgacactgctgtttttacatcctgggtctcctccaatgtgggatctaagcggctcataaatacagctgccaccaccctggcaaactcttcattacgggaattgctttcaaattccagtcttacatgttctttctgtctggtctgttccttctgtccttccaccttttccatcctcctgcttttataaatttcccagagcactttcacggtccttaaacccccggatcagacgcaccagcccgcccatttcaaggatacggaccactctcgggcctgctccgtaataagtaacagtccctctgctggctgccatctgcttataacggtttaataagaccccaatcccggaagagtccataaattctgtttttccaaaatcgaagataatgcggttgatatagttttcatctaacatcaggtccgtatccctttttaagtccctgcagttatggtgatccaactcttttggcatatggatcagtaacgtatctcccaatgcttcgtatgtaatttttgcctgtttcatggttcccagttcctccttataatattattatgggatgtccgccggaccggcagacgaaactcccggacatataagtctggcatacgcgcagtcagcgcgttatccgtatgtaaagccaaaaaaacagagaaaaggttgttattcttttctctgctgtataatttcaatattcaattactgaccccggttttcccaaccggagaactttacacattttaataccctcttgccgttgctgccctctgggcgtactcagagtctccatgttctccaacgatcttatcaaacatggcattggcattttcagtatctccattttcctgatacagacggcctacataaaacatggcttccgggttatccggctggatctttaagctggcctggaagtaatccattgcctgtgtcttgtcaccgccattccacagctgcagtccctgctgtaccagactctgatagatgttgcctgccatatcctgacggatgttgcttatgatcccctggatattttcatcttcgatcatatcaaagtttgcgtctgcaaaggtctttgctgcggttaccagatcaccggtgcggtaatactggagcacccagatcaggctctggtactgggccaggacactggtatttcctgttgtaagctcgtccagttttttctgtacctcgtctttctgggctttcagatcatcattttcctgctgcaagctgtcattttgctggtttgcattattaagctgctgcatatagccaatcagttcatcatccctgacacggtttaaactgctctcccttgcaggaaggaccagtacataaaaggcaaccagtcccatgatcagaccaatgataatatgaaacacagtggaaagaccggtattttccttgtaggtatttgggatgataacatcatcatcctgcatctgtctgtgggaaaatgccttgatcatcttccgcttttctgcatctgcccggcctgtattctgctttaccaaagacatgtaatacagggctttgggattgcttttgtcgatctgcaggatcttaaaaagggaacgtcctgccttattgtaatcttccctgcgcatatacaaaagagccagaagaagatgggcttttacaaaatgaggcttggctgccaccacacgggccagctgcaggatcgccaggtcatcactgccgttttgtgcatgccacagcgcctggttaaatgttttcacattctggctttctgtttctaactgtcccggttttctctggatctcatctaaataatgatctgccagattattttccggctgcaggtttaagctgatgacccactggactaatgcatctgccacttccccattttcataatagatcagacccaaaagatttctggcatctgtctgatatttagaaaaatgcaggctttttttcaggcactgtgctgctccggaaaggtcccgcacctttgccttttccagacccagattgtaatagctgttggctatctgtctgttctttgctgcaatatccatcatcgtttatttccgtctctttccttgatcagttccatcataatgtctgtcatatccgtaaggtcgctttttacaatggcatcttctactgcctctacatcaaggcttggtttgaaacgctcaatttcttcttcaaaatcgatcactgtatcttttctcctttcttaagctgtacctttaattctccgatcaggtacagggaacctgcacagaaaagcagatcatctcctgctctgttttgcatctgttccattgcttcttctgtatcctcataagaaacgacctggcaggaggcgtatgttttaaaaacatcagaaagccgccctgctgacagccctctgtcactgttcatatgcaccacaccgattcctgcccagttaagaccttcacaaagttcttttgccatggtttcatattctttatctgccacagcagcaaataaaagccaggcttttttaccggttcttttctggatctttcctgctgcctggataaaagcagcaattcccccaggattgtgggcgccgtccagataaacattttctgaagctttttccattcttcccggccatctggctgcactgatcccttcacagatcactgcatctgttatacctgtaaaaatacctttctgatcccgtaaaatgcgaagagccgttacggcgatctctgcattctgtgcctggtaaggtgcctcaaaaggaatagaaagcctgagccctttttctcccttttctttaagtaaaataccctctgagctgtcttctgtatcataaagcagctttgacacaggcagggaaactgccttcatttcctttgcttttgcaccgatcacagcgctggcgtctttatctgtatcatcaaatactaccggaacgcccatttttatgatccccgctttttcccctgcgatctgtgggatcgtgtttccaagatactgcatatgatccctgctgatggaggtgatcacgcaaactttgggagactctaacacattggtcgcgtccagacgtcctccaagacctgtttcgatcaccattacatctactttttcacgggcaaacagtaccattgccatataaaaaaggaactcaaaaaaagtaggatggcaaaagccttcttctaccatatgttccgcctgtttttttactgtttcaaaggcctcttcaaaggcatttttctctgccggttccccgtttataagaaaacgttcccggatctccaccagatgaggggaaataaaagtacctgtacgcagaccggccttttttaatacagaggtcataaacgcgcagacagagccctttccgttggtacctgctacgtggatagcagggatcttacggtccggtccgcccatctgatctaaaaatatacggatatcctttaaggaatttttcttgttggcccacatgggaagccggttcaaatatgcttctgcttccatctgtttcctttcctctttatattatacaaattttttccggttatcaactctatctttccccggtttttcgacttaaaataacatccggaacctgtgccagcacaatcgctgagaacataagaacgcagccaaggatctctcttcctgtcagcttctgtcctaagatcagccagcctgcaagtacggaaatactggactccagacttaagatcagggaagcgctggctggattgacgcctttttgtcctacgatctgtaaggtatatcccataccacaggacataacaccagcataaaggatcggtttccatgcagcaaggatctgggcgatatgaggctcttcaaagatcgtcatacagatcagggaaatagttccgcttaccagaaactggatgcaggacattttcactccgtctactgccggtgagaaatagtcgatgatcataatatgtatggagaagataaaagagcagatcatgatcaggaaatcacctttctgaagtccatgatcacttcctgacatacaaagtaaatacagacctgcaactgcaaggactactgccccggcgatggccggactgcactttttgccaagaaacaggctgaggatcggcacaatgataatatagcaggctgtgataaagccaacttttcccacgcttgtatacataacaccaaactgctggaaattagatgccacacaaagagcaacgccacagcagatcccgcctaagatcagtgtttttctgtcaccaggtgccttataatcctttccttctgccttctttttgcgatctaaaacaaggatcaccgggatcagcacaagaccgccgatgatgcttctcacaccattaaaagtaaaagggctcacataatccatgcctacgctctgggcaacaaaggcaacaccccagatcgtagcagttaaaagtaatatcagagcatttttcagtttcatcgtttgtttttcctttttcatacaagcttttcagccttttgttcgccctgtttggcaaaacggtccagacggcatgtaggttctgccatccgggccgtttttattttacgtgctttcgcacatttgattatttctccagctgtgccagacgctcttttacctgcgccatcatctgggtgtatttctccagttttgccttctcttcgtcgatcttggcctgaggagccttgcttacgaacttctcatttccaagcatagcatgagaacgctttaattcgccttccagacgtttttcttctgtctttaagcgctgaacttctttttcaatatctactaactctgcaaatggcatgtagatcactgccttgtggatcacagcagaaactgcgtcctcgccaatacctgccttatccttctgaaggatgacttcaccggcatatcctaaggatgcgaagaagctgcggctgttctcaaagatctttaatacagcatcatcctcagatactacataaacagttgccttcttgcttggcggaacgttcatggaagtacgtacatttcggattgctcttactgcctctttgatggtctcagttgcctcatgctctgcctcaaatgcccactcttccttgtatacaggccagttagaaagcataatggtatcttcctcttcctgtaagttgcagaagatctcctcagtgataaatggcataaatggatgcagcagctttaatgcctggatcagtacgttctttaaggtccagatagctgcagccttggtctcatctgcttcattgtacagtcttggcttcaccatctcaatgtaccagtcgcagaactcttcccagataaagtcatataccttctgaagagcaatacctaattcatacttgtccagattttcagttacatccttagtcagggcatttaccttggaaaggatccacttatctgccagtgtcaggtctttttcagtaacaccggaaacatctgctgccttttcaatattcatcataatgaaacgggaagcgttccataccttatttgcaaagttacggctgttttctacacgctcccagtagaaacgcatatcgtttccaggtgcatttcctgtgatcagggtcatacgcagagcgtctgcgccgtacttgtcaataacttccagaggatcgataccatttccaagggatttactcatcttacgtccctgggagtctcttaccagaccatggatcagtactgtgttaaatgggcatttgccggtctgttcaataccggagaataccatacggattacccagaagaagataatatcgtatccggttaccagtacatcagttgggtagaagtaatccagatcttctgtcttatttggccagccaagagtggagaatggccataatgcagaggagaaccaggtatccagagtatcttcatcctgcttgaaatggttcttactgcacttcgggcatacagttggagcttcttttgcaacaactacatcaccgcagtcctggcagtaataagcaggaattctgtggccccaccataactgtctggaaatacaccagtcacggatgttctctaaccagtgaagataggtttttccaaagctttccggaacgaattttaactggccgctctttaatgcttcaatggcaggtttagccatttcatccatttttacaaaccactgctgctttaccataggctctactgtggtcttgcagcggtcatgggtacctacattgtgggaatgaggaacgatctttactaacaggcccattttgtccaggtctgctaccatgacttttcttgcctcataacggtccatgccaaagtatggtccaggtacgttgatggtagcgtcatcatttaagataacgatctcctctaagttgtggcgctttccaacctcaaagtcatttgggtcatgagcaggtgtgatcttaacgcagccggtaccaaactccttatctacatactcatctgcaataaccgggatctgacggtcggttaatggcagctgcagcatctttccaacaatgtctttgtaacggtcatcatccgggtttacagcaactgcagtatcgcctaagagagtctcaggtctggttgttgcgatctctacgaagcgtcctggctctcctactaccgggtagttgatgtgccagaagaaaccgtcctgctctacatgctctacttctgcatcagaaatagaagtcttgcatacagggcaccagtttacaatacgagaacctttgtaaatgtatcctttttcatataatttgataaatacttccagaacagcgtcagagcagccttcatccatagtgaaacgctctctgtcccagtcagcggaagagcctaatttgtgaagctgttttacaatacgggtgccgtattcttctctccacttccagcattcctttaagaagccttctcttccaagatctgccttgctgatgccttcttccttcagcttgttgataaccttaacttctgtagcgatcgctgcatggtcagttcctggctgccataatgcttcgtatccctgcattctcttatagcggatcaggatatcctgcatggtgttatccagtgcatgtcccatatgcagctggccggtaatatttggcggcggcataacaatggtaaatggtttcttacttctgtttacttctgcgtggaaatattttcccttcagccatttgtcatagaggcggtcttcaatttccgccggattgtaggtcttttccagttccttcatctgaattctcctttttataatatgtcctctcggagtctttcctgcacctgcctttgtggccgattttccgccagctgtgcccgaatttcatcaacgtacgcctcagaaatttgggcacaactgacaaaaaatcttctcacaaaatcaggtacaaaaagattccgagagaacattaataagtacagcttttctctttgcagtaaacctcctggcagaggttgtatccatttgaaacagcaaaaagccctctgcatcccataggggaagcaaagggcgactgtatcgcggtaccacctttgatccaaccgatatgtacaacacatatatcatccatatccggtcatctcatggaatacgaaaacctgaaacatatcttatatatattttaaagcctttcgtactcgctcccttaacgcgggccaacggaacaggctaatgtatctttctcacctgtccggctcacaagctaccttccattttcaagtattcccaagcggcctttcagccagtgagccgctttctctgagggtcttaaaaatgtactcctcttgttcatcaccattttttatactgctgttttcaagcataaatattttttacggatttgtcaagagcaaagttattatagatgtatctttactgaggcagcttgcacacatccacccactgttcaaagtcacaggacttttccagatccgggatggacagttttacagcactattgctgcttccacatgcaggataaactacatcaaagcgtcttaaagactcatctaaatacacctttacgccctctttgataccgtaagggcatacacccccaacctcatggccgatcagttcagacacctgctctacggtcagcatttttgcttttacaccgaaaaaggatttatatttgtgattgtcgatcttcgcatctcctgctgccacgatgaggaccggtccttctcctgttaaaaaagataatgtttttgcaatgtgggccggttcacagcctactgccactgctgccagctctaccgttgcactggaaacatcaaactctttgatcctgtctccaaatcctcttttttccagaaattcctttgctgcctgaaatgccatgattatgcctcctgtttcctgtactcacttttccatttgctgatcagtttttttgccttttctaactgtccttcaggatcctgtttccacagggctcttaaatttctcacacttgctgcctgtttggcatctgtttctgcctgggacagtttccctttccattcttccttccattctggcttaaaaagagcctcatagctttcatcaacggaaagtcccggagcaaaacaggtaagaaaatagatcttttccaggatctgatcctcttcctttaatccataggctgtatcatatgccttatatgccctggaaaactggaacatctgggcacaggcagcccctaagttctgatagacctgggaccagaatgcctcttctccttttttgcgttccccttcctcggtcagtttttcatacttctgcagtgcttttccatactgtttctgggaaaaaagataatctgccactgcctttccataagcattttgagaaaggtttctgtaagaagccgttacctgcttaaatttctgtatctctttttctgtatagtaatcacattcagaaaggaacaggtacaaagcctcttccgggcggccgccggcttccaccagcttttccatgcgtcctgcaagaaagccaagtcccagctcatttttcacaaagaaaaacaaagaggcatctacaaaatcattcatcacaagaaggggatgatggtagatcacatagcaaagttcctgggaagaatatatatggatccccagaacttcaatataaaagggatgttttactttttcccttctgcacaataataaactcataagattacctcttgtctgatcactgcatcagatgccgggaacagctctccaaagcccatatcccggatcaccaccgccatggtattttcatctgtaaatccaatattcatccggatcctggtagtcttttccggccggtcaggaaaacctgtaaggggcacggaaacggctctctttttccgggagtccagatgggaaataagaaattcgatctctttttgtccatctaagatcagttccagagaactttttgactcataccagttatccccataggaggcaactgccagcatgatctcttttcctgcacgcatgactttcagggctacttctgcctttaatctaccttcacagacaaacacataaggaaattccgttccctgaaccatatagtcccttgccttgatcgctgctcccttggaaaacagcacattttccacaaacacccttctccggttgcaggcaagtttcataaaaccggttgcccagtcctgacgttcaaagccttttcctgtaaggaatacggttgaaaacaacttattttccagaagtttttccccacaggaacaaaggatctgatctgccagcttgcttccggaaggggagtcaaggatatccaagtcaaaggcttcttcctggttttgtgcttctgcctggaccatgttgcggcgcatgcccctttgtaccttcatttcataatagcagagccggtcttctgataactcaaataaacctacctggttactccacagctctttgcgctgactgagcacatagtaagcaaaactttctgtatgactgatcacatggacacggtccctgggaatgttcagataatctgcacagtacatcaggcagtctgttacttttgcgtctgttccgtgcatggtgatcaccagctgctccacctggtctgtatggaattccttaaaaggacagtctaacagctttttcaaaaatatctttaatagatccgtacctgtatagcagatccctcctatagtagaagttccctccttgcggaccattttaagcagcttgtctacgatcacgccttcgcctaaaagagtggctgcataggcttcttctcctatgagccaggtttctttctcttttctgcggcagatcactgtaggaactgtccaggacttttctttttcattgcagctgatctgggaataatcgtcattcagatctaacccgatcacaagtccttccatctatttgtttcctccgttgtagttcatatgtacgtttgaaatctttttggatcccatttcaaaaacacgtcagttcacaggaaataggatccccagggcagctgatcgttttacataatcttccattgcccctaaaagcccttctgcatcctgctttgccactgcctctgacatctggtttaagcaggcaaagcggctgttttctcttccggctctttccgggtcacagcaggtacggccttcttttacaagaacagcgcccttttcgccccgttcatagatctggtattctaaaagttctcccttaaacagggtcagtttctttacataaatgccctgatatacccgtttcatctcttccctggtaaaatggtcctcctggggaaggatacgcatttcgatccagggctgtacatttttgtctccccggtactcgatcatggtcttatccataatgtcttccgggatagaaacaaaccgtcccagatccttcatatatggaaataccatttctgactctaacagaatatttaccatgatctgcagctgtttcttctcatctgccgtgatctctgcctgtcctgcatagtaacgggtaagagccagcagatagatcgtagggatcttttccttgccaggatccgcgcccactgcatttttcaggtactggaagatctgactgtcgatctccttttcttccaggaaatactggatacacttctgggtaaaatatgcttttaccatactttccctggtgcgcttgcgcttcatgtaaaggtcaaatacagaatcaatctggtcacagctgcctgtaaacaacatctgagctaacagacgttcttccagatcataggtttccacatgttcccctactgcctggatcaggatctcatacatctgggaagtggtcccgttaaaatgttcacagagataatctaagatcacgctgtccgcttttccagcctcaaacactctccaggacagttccagtaaacggtcatcctggtcaaacagctgctgtaagatcatacgggtacaaagctttaacagcttctccggatccacatcttctatttcataagttaaaagcatattatatgcttctcttaaataattacagtctataaagatctcacagatctttcttcgcatggacggctccagcaggtccttatctaactggatcaggaaagcgcaccgctcttcttcttccttggaaacagcctttttacagtaatattctgttaccagatgaagaagctttttctcaaatacaggattcagctttaactggcttaaggtatcttctaaaagaagggcttcctcctctttttccacgcctttttttaacacagcctcacaggcgcgaagctttaagataggatgatccggatatacctcataacagcggtcaaggagctctttccggtccatgaccggcagtttccgatggcttatattcagatatcttcccccatatgcatcctggaaaaacaggactgtattcttagaaacagccggaacataagcttccccatgttctaataaaaatgcctcttcctcttttaattcctcacagcgcacgatcacatatttcattctcggatcatcacattttacgcggctggaacaaaggatctttggcaggatccctgcagccctgggatcgatcatatctgtatagatcatgtgctcatagatcacagccagacagccgttcattctgcctgcaagcagctgttccatggcaaactgctccatttcccgcacatagacctgatacagttccgtagaagggtttacatactgtaaaatgtttttatacagcacacttttattggcctggtctaaagatttatcataagagaaatacaatagcacttcttttggaagggcatgtccataatcatccggcagagaataaaggaaatattcataaagccttgtaagattgatatgggcttttaaggccttctcataccagccaaaggcggatctgtctttcttttctccccggatcagaagaccgcataatgcctctaatacctgcatttccggataggatctgtataaatttactaacagtctttccaggatcttcctgtaatgctttacctctgaaagggataaagcagcttttacagccaggttctggtccagccagccattttttaatccaccaaggaagacctggatctcaaattctcccatttttacaaacagatccggatgcatcttaagaaggcggcaggccagtccatataaaaacgggcttctgcagccatatccgaacatggagcgcatctgttcataaagctccagcggattttgcaggcaggtcctgtctgtttttactaacaggttaagaagccagccatccgttttcctgttttcatttaagagcttacgtatgtagcgggccagtgctgcctttttctcttcagaagaaggctcatttaacagctctaaatactgataaaagcagtagatttccggtcttgtatccctgcatcttaaaacaggatctccgatctctgcaagagccgctgtatacgcatcttttcttcctgctttaaaaagctgttctgtccgccacaaacgtacagctatatcttccggatatctggcacggagattttctgttttctttaataacccgctgtttacagaaaaatctccctcatctgtaaattcctgtttcaggcgcagacgggaaaattcacagacagatgccttatctgctgtttttttctctcttccatctgctccctgaacatttttctttattacttctacagggaaaacaaattcctggcgcagggaacggatgcgcacagaaccaaagtttcttccgacatgaagatattgtggaaggatctggtaatggatctggcagttgccctggtcaaactcacgggtggtcactgcatttttttccacagcaagaaaatccccgtctgcttctacctgtatttttacatagccccagccactggctgtaagcccgatcacaccttctgtaatggtttccggtgcatttaacaggatcttttccccgtctgtacgcagggaaaccgcttcctttacatgaagagctactaaaaattcctctaacagattatttctgccgtttcttccctttaaaccctcatagatcgtccttgcctgcacatcctgcataaaaggcgcttctgtaaaatcctgatattcaaacaggcgcagggccagttcccagtttttctttgccagagctgcaaaatcccttggggtttttaagcttcccagttcctctgtcctgtttcctgtctgtatgcgcaaagaataaggaatctctttctcgcctccgtttgtgaccaggtaaaaagatcccttaactgtatctccatcctctaagtatcgggtgtcgatgttatatataatgtgattgcgaagtccaccaaatgcttcgctttctaattttactctctcatttccggaatacaccagtcctttaatatacaggtcatttccgctttgaacggaaaattctccccgcacggactctcccggtgaaaggaccccttcgatcctctctggttttatcaccagctctggcacgctgctgtcaatgatcccgcgggccaggcggttgatccgttctctcatacactaccacctgtatctatatgtactctcgcatatttatctgtcagtttctcaaatgccggattgctgtaagctttgcactcccgcatttttgcttcgcttcgattggtgctgaacatttgccactggcacatagcacctaacccccatgataacacaattccttctgttttaaaagtgaaatctgtcttgatttaaagaagcaaacttgttatgatagataagaatgttcagaaatcttttaacggagtgtgaaataatgcttacggaacctatgactttatataaactgatgaacctgtatctgttaaaacaggtgaattttcctcttaccaatgcacagctgaccagcttttttacagaacacgactatactacttatttcacactgcagcaggccttaaatgaattagaggatgccgggctgatccacaaagaagccagccactccagcacccgctatgatattaccaaagaaggggaagaaaccttaaacttctttggcaaaaatatttctcctgccattatcaatgacatggatgaatatttaaaggaaaataaattccgcctgcgtgaagaggtaggtaccaccgccgacttttacaaaggtaccaaccaggactacatcgtccactgtgaagtacgtgaaaataaggcagtcctgatcgggctggacctttctgttcctgacaaagagcaggcggaagctgtatgcggcgcctggagacgtaaaagccaggagatttattctcatgtgatgcataccctgctgtcttaaattttgagaaacactgtgatcatccatgaccgccgcacctgcgatatactggcagtcaatcgtaataaatcatcaaaaaacacgacctgagagtttttctcccggtcgtgtttttgtgtcagagcacattttttatatatgttcccttaattattcttctgttttctcttctgcctctgcagctgtattttcatttacatctgccatggtatcttcgatcagcctccagatctcatctcttccctgctttgtttcagcagaaaacgggataatgatcccatctttttccattccaagaccctgacggacgatctttacatttttctggatctggctgcggttgatcttgtctaatttggtagcaatgatcaccggatgatagccgttatagatgatccagtcatacatcatcttgtcgttggcagatggttcatgacggatatcgatcagaagaaaaaccagttttaacatggcggagtttctaagataacgctcgatcatcttgccccatttttccttggcttccagtgaaaccttggcataaccatatccaggaagatccacgtagtacaactctttattgatattgtaaaagttaatggtctgggtctttccaggctgggaagaagttcttgcgtaggctttccggttcatcagtgcattgatcaatgaggattttcctacatttgactttcctgcaaaagcgaactccggcagtgtgttgtccggaagtttgctggtaacaccgcagactgtttccagatttacatctctgatgatcatacaaatgcctcctttattacttcatccatatttttaacataaacgatctccaaacctctggtgatctcttttgataattctgccatatccggccggttcttatccggaaccaggacttttttaatgtgggccatcttggctgccaggatcttctccttcaggccgccgatcggaagcactcttcctcttaaggtaatctcaccggtcatagccacttttgccagaactttccgtcctattacagcagaaagcatagctgttgccatggtaatacctgcagacgggccatcctttggaactgcaccctccggaatatgcagatgcagatcatgtttttcaaagtaatcatctgccacctggtaatccggacagatcgagcgcacataagtcagagcgatctgagctgactccttcattacatcacccatctgacctgtcataaggagatttccttttccaggcatcacatttacttcgatctgtaaggtatcgccgcctacgctggtccatgccagacctcttacaatacctacttcatcttcttcattggcatcttcaaaagagactctctcttttccaagatatttttccagatttccttcatttacacggatcggtccctgcttcttttccagatattttctggctgccttgcggcacacatccccgatccggcgctctaagtttcgcacaccggcttctctggtgtaattgtggatgatcttttccagacacttatcggaaaatacgatctgctgtggtgtaaggccatttcgctcgatctgttttcctaccagatagtcctttgcaatgtggaacttctcattttctgtatagctgtttacctcgatcagttccatacggtcaagtaatggtcccggtatggtctgggtggtattggcagtggcaataaacagtacctgggaaagatccacaggaacttctacatagtgatcgcggaattttacattctgctccccgtctaatacttccagcaaagcagaggaagtatctcctttgtagtcactgcttaccttatcgatctcatctaaaagcatcagcggattggcaactcctgcctggcgcagtccttctaccagacgtcccggcattgcccctacataagtctttctgtgtccacggatctctgcctcatctcttacaccgccaaggctgatgcgcacatattttttatttaatgcttttgcaacagatcttgcaatggaggtcttaccggttcctggcggacctactaaacagatgatcgggcttgtacccttcttggtaagagaacgcacagccagatactctaaaatacgctcttttaccttttccagaccatagtgatcctcatttaagatcttttctgcatggcggatatcttcgttatctttggaggttttcttccacggcagttctaaaagagtctctatgtaggtccgcagcacattggcttcctggcttccggcaggcatggtgcggaaacggccgatctcttttaacagcttttccttgacttctttgtctgcctttaagctttctgttttcttctggtactcatctgcatcagataaagggttatcctcccctaactcctgacggatgatcttcatctgttccctgaggatatactctttctggttctggtcaatatccgcttttactttctcctggaattccttttttatacggtaaacttccatttctgtcataagggtctgaaggacagcctcatatttggcagatatgctggaacactctaagatcgcctggcatacggtataatcccatggcatctggataggaatctgctttaacatctccttcagatcaccgatcagcagcagcgccggaagtatttcctttgccactctctgattgacagttccatattcttccagtttatcctttaaaatacggagcattgcctctccggcaagaggttctgtatcttcttcctcttcccccatgaggctgatctcacccataagataaggttcttccgtatcaaagcagagaagttccgctttttccagaccttccactagaacgcggacgtttttagagggaagctttaccagctgttttactacagaaacggtaccgatctgatacagatccgaaagttccggatccggtatctccggacgcttctggctgactaaaaacagcttctgatcccctaacattgccttttcaaccgctgctatggatttcggtctgcttacatcaaaatgctgcaccatacccggcaggatggtcattccccgcagggccacagtgggcattactattacttgttcttccattctatcttatgcacctttcaatctatcaaaaagagggcatgccgcaaaataagactactttacgacagccccctaatcttctctcgaaatctatcaggcgatctctcctttttttccgccacgcagtctgtctgcaacagatttacgggcagttgtcggagctgcatcacgatataccagttccggctcacctgtcttatcgatcacatcttttgtaatggtacagatacctactgtatcatcagacgggatctcatacatcagatccatcatagcattttccaggatggaacgcagtcctctggcaccgatctttctctttactgccagatttgccacttcttccagagcctccggtgtaaactcaagttttacatcatccagctcaaacagcttcttgtactgcttggtaagggcattctttggttcagaaagaattcttaccattgcttcctttgtaagctgctctaaggaaaccatgaccggaacacggccgataaactcagggatcagaccaaatttggtaagatctctcggctctacctgccgtaaaagttcatcaatatccatctcattgcgatttaccacttctgcgttaaatccaatggaacctgcgctcatacgctgctctacgatcttttccagtccgtcaaaagcaccgccgcagataaacaggatattggttgtatcgatctggatcagttcctgatgaggatgcttccttcctccctgaggcggaacgctggcaacggttccctctaagatcttaagaagggcctgctgcacaccttcaccagatacatctcttgtgatagaaacattttctgatttcttggtgatcttatcgatctcatcaatgtagataatgccgtactcagcacgttcaatatcataatctgcagcctggatcagctttaacaggatattttccacatcttcgcctacatagcctgcctctgtaagagaggttgcatctgcaatggcaaaaggaacgtttaagatctttgccatcgtctgtgccaggtaggtcttaccggaaccggtaggtccgatcattaagatattgcttttctgtacatctacatccatatgctggcaggaagtaactctcttatagtggttgtatacagctacagaaagtactttttttgcatcatcctgtccaattacatactcgtccagaaatgccttgatctcctttggttttaacaggtggatatcgttaaaaagaggtgcttcctcttctacatcttcctcttcctgttttcccaactcttcctctaagatctctgagcataattcaatgcattcatcgcagataaatacattatgattgcctgaaccggcgatcatctttctaacctgatcctgtgtccttccgcagaaggagcagcggatcgtatcatctggtctaattggcatactatattgtacctaacctttcattaacactattaatgatgtgcaaggatctcatcgatcagaccatactcttttgcttcctgtgcagtcatgtagttgtcacgctcagtatcacgggcgatctcctcataacttcttccagtattggcagccaggatctcatttaatttcttcttggtctttaaaatgttctctgcaacgatctggatctctgttgcctgtcctctggcgccgccagatggctgatggatcatgatctcagagttaggcagtgcaaaacgttttccctttgttcctccggaaagcaggaaagcgcccatacttgctgccataccgatacagatagtggacacatcgcacttgatgtagttcattgtatcgtaaatagcaaaaccagcagatacagaaccgcctgggctgttgatatacagatggatatccttagaaggatcctctgcttccaggaacagcagctgtgctacgataatgcttgcggaagtgtcattaacctcttctcccagaaaaataattctttccttaagaagtctggaataaatatcataagagcgctcgccacggcttgtctgctcaatgacataaggtactaaactcatataaccatcctccgttatgatctttatatctgttttccatcccatagcgggaatttttcccagatatacgtttaatatacaaaaccaaggagactctcagcagagaatccccccggtctcttgtgtacaacttttaataattaagccagcttagcttctgctactaacagatcaactgcctgctgtacagctaagtcttccttcatctgcttaacatcgctttcgctcatgtagctctttaacttctcaacttccatcttgtaagcttctgccatcttagctacttcttcgtcaaccttctcgtcagagatctggatgttctcagccttagcaactgcttccagaaccagtctggtgcgaattctcttctcagcatccggacgagcctgttccttcatctgctctacagtcatgccggtgtactttaagtacatatccagagacagtccctggctctgcatacggcgagccatatcctgaaccatgttctcagcctgagcgtcgatcatcttgtccgggatctccatggttgcgttctcaactaccttagcaactacagcgtcttcgttcttggagtttgcttcgatctctttcttctcagctaacttcttctcaacgtccttcttgtactcgtctaaagtatcgaattcagaaacttcagatgcgaactcatcatttaactctggaagttcttttaccttgatttccttaacagttaccttgaaggtagctggctttccagccagatctgctgcatggtactcggttgggaaggttacgtttacttcgcactcttcaccgatcttcttgccgatcagctgctcctcgaaggtatcaataaaggaatgggaaccgatggttaatggatagtcctcagcctttccgccttcaaagcccttgccgtctacaaatccctcgaagtcgatcacggtctggtcaccgtcttctactccacggtcttcaacagtaagcagtcttgcgttctgctcctgaaccttctttaattcagcctcaacgtcctctgcacttacagaagcgtcagccttctctacttctacgcccttgtactggcctaaagtaacttctggcttaactgttactaatgcgctgtatacgaatggctcatctttgccgatcttctcgatagtaacttctggtctggaaacgatatccagtccgctttccttcatagcctcagcgtaggaagcgttgattgcttcatcagctgcatcctcatagaatacgccttcgccatacatcttttcgatcatagcctgaggagcttttcctttacggaaacctgggatcgcaaagcggttcttgttcttgttgaacgctttcttgatcgcagccttaaaatcctcagcgctgacttctacagtcagttttgccatgtttttctctaatttttctacctgtacactcatttctacgggttcctccttgaaaatatatgtgattcgcccatatccatgagggcgctacacttcaagttagcattataacatggcagtcagaaaaacgctagtattttttgataactttcataaaaaagcacacaatctgctgcaatttccggcagaacagtctcaccaaataaagttctatccccagaaaactattgtttaatcttcttaaagtcgatatacttatttcagaaaaactcacagagaggcggatatagactatgtcagtgacattaaaagatgttgcagaaaaattgggagtaacaatcaccacagttcacaaagcgcttaacggtaaagaaggcgtcagcgaaaaacgacgcgcagaaatcatgaaagttgctgcgcagatgggatacaaagttaactatatggcatcctctctctcaaagaaaaaatttcacattgcagttgttctgccaaatacagatggggataaccgtttttactatggtgctctctgggacggcatccgaaattatctggataccgtaagtgaatttcctatcacagtttcagaatatgcctatccgcttacccgtgacggcaacggactggtcctggaaaaaatattcaaccaggactctgatgatctccagggattgatcaccattgccatggatcatgaccgctcttcttatttcctggaaaaatttgccaaaaagcagatcccggtggtgcttattggcgctgatctccatacagattttcgtctttgctgcatcaaagcaaatgatacagctgtgggctatcttgctgcagagcttctcactgcttttcttccatccggctatccggcaaagatccttatggccggagactatggctgccttggcatggaggatcagcgccttaatatgcaggcattttcagcttacctgcatacctatgcaccatctattgaaacagttccgttccagggttccgatccccttgctgtcagcaaagagatccggcagtatctgacggtccatccggatacctatgccatttatacctgcagtgcccgttttacctaccatatttcccaatgcatccgacagttagggatccaggaccgtatccaggtcataggcaacgatcttttcacagaaagccgtcaggcactgtccgatggcatcctgcgtggagtgattgacaaaaaaatctccaagcaaagcgctcttgctgtaaagaccctgtttgattatctgctaaaaaaggattatccccgcagcagctgtctggtcatggaaccggaaatagtgttaaggagcaatttccaaagccattcagacttgcaaaaataaaagtaccggctataaaaaaacggttatttccacgacagatgactgcacaggaaataaccgttttctcatattttatttttctcagtttttatacttactatatttatacttacagaagtgtttctacgtaagccttgattgcctcatccttgcaatttgcaaagaacagttccttaaactttggtccggctacagcgccctttaccagttcctgatccagtcccttgcagcaggtgatcacatctttaaagttgttggctctcacctgatccaggattttcttatttctctgctccggtactacacgctccggcggatagccgttaccgctgccaaaaccaaataatttctcaaaactgtaacgaaggttcagctcaccgccccatccgtaattctgtgcatatggcatagctacgcagtttccgtcattcacctgtgcaaacagaaatgcatctgatggattggatacgtgtccacacactacatttggaaaactgttgcaggcgatcatagctccctgaccagtaccacagcctgtcactacaaaatctgcagctcctgaagaaagaagcaaggaagccagaataccgcactgcacataggtaagctgtgcctcgtcatctgcggaatacatgccgtagttgtctactacatgtcccattggttccactactcccttaagttcacggtaaatgatctcgtttttgccagcctggctgttttcgttgatcaacgcaattctcattattttatcctcctgatccctaaaatacattttcacctataactgcgtcctctgacgcagccatatttttctcatcttgatcttaatcttacagaaaatcttctctcataggagtaaagatatcgatcaaaataccatcttccagacaggtacagccatgcatcactccgtcctgcttcagcagcgtatcccctttactgactgtatgtacttctccgtcaatggtaaattcaaacttaccggatgccacataggtgatctgggtatgtggatggttgtgcattgctccgatggaacctttcttaaaggtattttccacgcacataacattatcacaataagctaagacccggcgcacaactcctggtgctgtctcctgtgcctctgttttttcatgaaaaacccatctttgatctttatttggatagtccataattcctccttgttgatttgattgacatatataataagcttattatacgttccttatggggatgcgtcaagagttaacgtttacttttttaaatataattcattaaatttgcgttttttctgaaaaatatatataatgaagcccagggggaatacttaaaatgacaaacaaaccgatctacataaaaatatacgataaattaaaatccgctatcaagggcggcacctacccgccgggaagttttcttcccacagagcaggaattggaaactttataccaggtcagccgcactaccatccgcaaggctgtaaaactgctttctgatgaaggtattttaagtgtgcgccagggctgtggcacgatggtcatggacatccgcactactcagaattataaccaggtcacttctgtaactgagtctttgcgaaaacgtggctatgatgtgaccacaggaagcatgatgatcgatgtgatcccggcttccagggatattgctgcagacctttttataccggaaggaacgccggttgcccggatccagagactgcagctggcagatggcagaccggtaactttaatggaaaactatattgaatatgcaaaagtccctggcattgagcagcacagcggccatttcgttgccctgtatcagtttttagaagagacctatggcctgatcatcgatgctaccagggaccgtatttcagccaaatctgcagatttcttagaagcccgtgtcctggaaatagaacccaaaaccgctcttttagtgatccggcgtatttcctattatcaggataagccggtgagcattgaccacgtgcgcatcattggcagccagtacgaggcagagatctcaggaaaaggaaggagcaaataatatgtgtctcacagaacttgcaaaaaagatcgacatcagctgcgtccgggcattccatacccgtgatgagatcgactctatggtagaagctgccatccggtatcatttcgctgctgttttcacccttcctgccttttcttcttatgtagcaaaaaagctggctgattacccggacatccacacaggaggcgtcatcagctttccgggaggcggtgatactatttcccagaaaagcagacaggcaaaagaactgcgtgaagccggttgtaaagagcttgatatggttatgaatttaacagctttgcggagtcatgaagacaattatgtactggaagatattggtgctgttcgggaagcagccggtaaagatatcttaaaggtcattattgaagcacctcagctgacagaggaagaaatacgcagggcagtaaatttatgcatccgggccggtgctgattacgcaaaaacaagcacaggctggtatcctgcacacccttctgccctctctcaggtacagatcatgacagatgaggcaaagggacgtattaagatcaaagctgccggagggatccgcacattagaaaccatccatgccatggaaaaagccggctgtgaccgttttggcatcggtctctcttctgctttaaagctttttacggacctgtcttaatgatcgatcctgtatctgcccttttaaagatacctttcaataacctttctggcatttattctaaaaagatacctgaaacattgtgaaatatgcctataaagtcaccattgattttatgaccttttagtgatatatttttaactatcagatgatatttttttaacaaacaaatactatataaatgcatcattgaaaggagaacattatttatgaagggttacgcaatgttaaaaatcggagaatctggctggattgagaaagaccgtcctgcatgtggaccaatggacgctatctgtaagccattagcagttgctatctgtacttccgatgtacatactctctgggaaggcgctatcggcgaccgccacaacatgatcttaggacatgagtgctgtgcagaagtagttgaagttggttctatggtaaaagatttcaagccaggcgaccgtgtattagttcctgctatcactcctgactggaactccttagaggctcaggctggtttctccatgcactccggcggtatgttagcgggctggaaattctccaacttcaaagatggcgtattttccgaatacttccatgtaaatgatgcagacggcaacctggcactgctgccatccaacatcagcccaactgacgcatgtatgctgtctgatatggttcctaccggtttccatggcgtagagctggcagatgttcagtttggtgatactgttttagtagttggtatcggacctgtaggacttatgtctgtagcaggaaccaatatgcgcggcgcttcccgcatcatcgcagttggaacccgccctgtctgcgtagaagcagctaagaagtacggcgctaccgatttcgtaagctacaagaacggcccgatctggaaacaggttatggatatgacagacggcaagggcgttgacaaagttgtcatcgcaggcggcggcgttgaaaccttcgcagaagcagttaagtgcttaaagccaggcggcaagatcggtaacgtaaactaccttggctccggcgataccattgatatcccacgtacagaatggggcgttggtatgggtcacaagcagattaacggcggtttaatgccaggcggacgtttacgtatggaaaaactgggcgctttagtatctgccggaaaactggatgtttccccattaagcactcatgtattcaagggctgggatcacctggaagaagcattattccttatgagagacaagccagctgacctgatcaagccagttgttgtgatcgaagaataaagactttaatggctaaatagcatacttatcttgaggacgcgcttctggcgcgttctcgttctactacaggaaaacagagcacgtactctgggaattggggattttggttatcatatgaaaatactgatcgtatccggcttcctgggcgcaggaaaaactacttttatcaaggcattggcaaaacacacaaaaaaagactttgccatactggaaaatgaatacggtgccgctggcattgacgcagaccggctgcgtgcagaagaaggtcagagccctgtcaacatctgggaaatgacagaaggctgcatctgctgctctgccaaaggagatttttccctgtccgttctctccattgccaataccattgacccggaatatctggtcatcgaacctaccggtgtcggtatgcttggcaatgtcatggaaaatttaaagcagatcgaatacgagcatatttccattttggcacctgtgaccattgcagatatctacagctaccggcgttatttaaaagaatatcctgctctttacgagaaccagatcaaagatgccggaactattttcctgtcaaagtccgaacaggcttctgctgaagaaaaagaagaagccagacaggtcttagccgggatcaatcccacagctacgatctatacagaccactactcttctcttcctgagaaagactggctgcggcttcttgaaacagggtatgacggacggttgtaccaggtaaaggcagaagaaaccgaaaaccttccggataccttttccattgaaaacgcctatttttcttccccagagtctcttcttatattcttagaagatctgatccggggacagtacggaaatattttccgcgccaaaggacagatccttgccggttcccagtggtttcagtttgatgtagccgacagccgttatggcattacaggctgtgaaccccaaaagactggaaaagctgtattcatcggcacagagatccacagacaacccatccgccgtgtggtattaagtaagatgatccagaaaaaaatcgtcgtaaaaaaacgatgaacattgacagtctgagcatacctgatcttcccaaaaacgcctttcaccaggcgttttttaatgttctctttttaaaaagtgtctggaaacatatgcctgtaattgcattttatcttctcctatgttaaactgttttagatatagcaaaatcatatttataaaaataaaggggttaaatcacatgagcaaaaacaaacgaagtacattctccggaaaactgggctttgtactgtctgctgccggtgcttctgtaggacttggaaacatctggcgatttccgtatctggctgccaaatatggcggcggcatctttttactggtctacatcatcctggctcttaccttcggctacaccatgatcatggctgagacatctttgggacgaatgaccaaaaagagcccggtaggcgcttaccagagttttggaaaatccaaatggctctctcttggcggctggatcaatgccattatcccgatcctgatcgttccttactactccgtaatcggcggatgggtcatcaaatatctgatcggctatttcagcggacaggcgcagacacttgcctctgacacttatttttccgcttttatctccaatggagcttccacagagatctgctttattgtttttaccttctgcaccttaggcatcatctacgcaggtgtgcagaatggtattgaacgtgtttccaagtttatgatgccggtcctggtagttctttccgtgatcattgccatttattctgttaccagacctggtgctttggaaggcgttaaatactttctggtacccaatccggcaaacttttcctggatgacagttgtttccgccatgggccagatgttctactctctgtccattgccatgggtatcctggtgactttcggctcctacatgttaaaggatatgtccattgaagactccacccagaatgtagagattttcgatactgctatcgccattatggcaggtcttatgatcatccctgcagtatttgctttctccggcggtgatcctgatacactgaacgccggtcctgcactgatgtttattaccattccaaaagtatttgccaatatgggccttggaaccggtatcggtatcctgttcttcttactggtattatttgcagcaatgaccagctccatcgcactgaccgaaagcgccgtttctacctttgaggatgagttgtactggggacgtaaaaaatctaccattgttatggcagtgatcatggtatcccttggttctttatcctgtctgggatacggacctttggcaaatgtgaccatcatcggcatgcagtttctggatttctttgatttcctcaccaactctgtgatgatgccgatcgcagccattgccacctgccttctggtctccagagtcatcggtgtaaaaaagatcgaagaagaagtcaccttagaaggaaagccattccgaagaaaaaagatcttctattttatgatccagtacctgtgccctatctttgcagccattatcctgatcagttccgtggctaatgcatttggatggatttctatgtagtttttaccaataactcttatattgtttcctatgccaattaaaagactgctgcaaaatggattttctccgttatgcagcagtctttatactatttaccttattattttctttctgtacacagttgtagcttttcgcgcaaaatgcaaaatat

SEQ ID NO: 3549 - DNA, 8231 bp, Unknown
  gut microbiota DNA sequence
ttaacgtttacacaaaacttgaaacggtctcaaaaggctctataggagaggacggagtactccgttcccataggcccatggaactatattcttagtcttctggaagcattaatcgacacttgtcatgatagtcattgcaagtatacaacaggttgtatccaccattattgttttctggtgcaacccatagacatccggtttttagtttcacagtctgtcctgttaattgaaaagaagtgatccctggctttccccatacattcaagtattcatccttgactgtttctgtttccataaaatcatactggagctgcgaatagtagtttcttacattggcccagtctgtcgcaactctggctttatgaagctgctgactgaagatcggaacggagatcgccacaagaactccaataatagcgacaacgaccaagagctctgccagcgtgaatccatcgtttttctttttcatagcacttcacctcctcatataatcaagtgttttctattgaaaattcaaggtttttcaacctttcatatctcagtgaataagccacatctataagcatttcgatgtatcagtgtcaggtactgaaatagcggttgaatggtatacccttccctctatggcagctaacctcctatatccaccaggatcataatccacacgtttagtctgcatcgcataatctctaactaatcctactataacattcggatccttacggtcatttttagttgtattattgtcgttttgcgttctgtgtgtaagacttcattgtagatacctctctctgttcaataagatttttactaacctgtcagtcaatagtcttattgtactctgaggtattttcaattttcaacatccaggttttttattatacagaaagttccgattttgttcaactattatatcttgaaaacgtaaaaacacaaatggaatctataaggattcgaaggcagaagagcgtattggtctttcgatctttcgaggtctgctgggagagcacacaaagaaaaaagaagccaaaactactacaaaataaagaaaaagatagcattatgctacgagaaaataacaaataccagaaaagattatctgcacaagatgtcacatgagattatcagcgaaaaccaagtgatagtttcggaagataaataaattttatgccagcagtcagctgtgtgccgtttgcggataccaaaatacagaaacaaaaaaactgtccgtaagggaatgggtagttcacgtggaaaacatgtggggtgagacaaaagaaggggtgaagcgctactgtatccagccggaggaattactggatctgttaaaagccattggctccgacaatctgggtatctgctgggatacagaacacggcgccatcgaaaacctggaccaggataaggcgatcgccaaagtaggtccctatcttcgggctacccacatttccgaccagacagaccggggaaatgttcatgtgcttccttatacaggaaatacagactgggatatgattttaaaagctctggcaaaggcagattataaaagggcttttacctatgagatccagcattatcttcttgctatgccggagaagctggtgccggatgccatccttctcagctacaaagtaggcgaagagatggcagaccagctggagcattataaaaagatattagcttaaccctttgacaggcggctgttgtgatactcaccggaaaaagtaacgtcctctccaaaccatgcaggcgggttaaatgcctttgcttcctcttcactggcaaattctacctctgcaaggataagaccgtcgtagtggccttcaaagacgtctaattcaatggtaaggtgatcatttcccggaaccgggatcatatatctcttttttgtaaggataatgccatctgccttggcaagcagatgttcataggcttctttattcagaggaagattatattcttccctggataagaggccttttcccttgtaggtgagatagtagtcatcattgtccctgcggacccggaccacaggatctgtatttaagtaggcctgttcgatctgtctgcagggaaaagatgtacacccttcagggatttgtttaatgagaaattttctttcgatctccatgtagatactccttctggttgtgtgcttttttaacaatattttgcacgttttggtatacactatcatagcatttatctcttttcagaaaaagggaaaaatggtaaaataaataaagtttcagatcggttacacattatatgtataaagggagaataaaaaatgtcaaaagtttttgcgtttcttgcagatgggctggaagaagtggaatgtcttgcagtagtagacgttcttcgccgtgccggagcagaagtaacacttgtatcagtaacaggaagccgtgagatcacaggctctcatcatattcattttcaagcagatgccctttttgatgaaacagcagcagaagaagcagatgtattattcctcccaggaggtatgccgggaaccaatacattaaaggctcatgaaggcttaaagaatgcgatctgcaaggcaaacaagcaggggcgccgcattgcagccatctgcgcagctccaagtatccttggggaaatgggactgttaaagggaagaacagccacctgctatccaggttttgaggacaagttagagggtgtttcctacacccgtcagggcgtgatcacagatggaaatatcaccacagcaagaggacttggatatgccttagatctggggatcgaactgatccgtctgctgatgggacctcagcatgcacagatggtaaaggattccatccagtacgaccaggtataaggaatatagattatcatattaaaataagtaacaggagtaaaaaagactgcacagataagaagtgcggtctttttttctaactaataattgggaaaaactggaaatttaaaaatacattaatgcttttaaatgtgtcaaaaaaataaagtaaaaaaccggaaatgtgtcaaaaacaaaaaaggagcgggaaaaatgttctgttataataaaggcacaaagttaaagattcacagaaatcaaaaaggaaaggggaatgaagaagcatgacagaaagacagatggatattctgtattaccttcatgcgcaggatgattttgttcctgtatcagatatttcagtggccttgcaggtatctgtgaaaaccataagaaatgaattactgatcatacaggaggtgatcaaaaaggaaagcctgggaacattggagaaaaagcccagactgggaataaagctggtaattgaagctgaggtctgggagagctatacaagacagctggaaagtaaaggattaaccgcagaagaagcggatgagaaaagcctgttgatctattatcttcttacaaaaggacagattaattatacagagatccaaaaatatctatatatgggtcgttcggcagcagaaagacttatacctgaggtggaaaaatggctgaaaaaccgaaagattaccctggaaaagggacggggaaaaggattttggattctttgtgatgaattttcctggcggattgcgatgtggaatcttttcctaaggataaaaaaggaaaaatatacatgcaggcaaaaaggggagtatttgctgatagaagattttttaaaagggtttgataccaatggaatcaacaaagcaatttgctttttagaacggcagtacagtttttcttttggatatgaagttcatatacaaatgtttttcttattatccttatccattgtccgggcaagaaaaaataaaaatgttcaattaccggatgtttcacctataaaggtaaaagaaagatatacaaaacatattacggaaacgttgatcaaagaactggaaagaaattatagcttatctttgcaggatacagagaaacaatttattgaattcgcagttgggatttctgatatccagatctttcaggatgaaaagcagatgctgcaatgtgaagcagatgatatagaactttgctatttcagtatacgtttgatctcactgttaagtgatattgtaaatgttaatctcagacaggatctgtttttttcaaaaactttgtttttacagctgcgttccatgatcgtaaggttacagtacaatataaaaattgtaaatccgcttttaaaacaggtaaagcaaaaatatccaaatgtttttgcagcagtttatggggcaggcgtatattttgagaaagaattgggattggaattaaatgagcatgaaatgtgcagtcttgcattacttttaggaggtgctatagagcgcagcctttcccgagtttcagcctgtgtgatctgtgattacggaattggaatgtcgcagatcctgcgggaacagttagagcgtaatataagtgatctctgtattacagaagttctttctataagggaaataagaaaattgaaatcagtttcctgtgatctggtgatcaccacaatgcaattggatacgccttattatggaaaagaagtagtggttgtagattgcctgatgacccagtatgacatacgaaatattgaaaatcgtatgaagcaggtaagaagacgaaaattgaaaacaaaacagccctgtaatcagttgcatatccagaaaaatcttttttgtgaagaatttgtgcatctgaatcttgaaataaatgataaaaacgaactgcttcatatgctgtgtaaacaattagaggacagtggttacgttacagcagaatttgaaaagtctgtattggaacatgaggtaacagcacctacagctcttggaaaaggagttgcgatccctcacggaaatgccaaatgtgttataaggcctgcggttatggttgccacattgaaacgaccagtgaaatggcaggaagacgaagatgcagatgttatatttcttcttgcatttaatctggatgattctatgggaatgaaggaggaaactgtaaagttttacagtgtttttctggatctgtgggatgaagaagcagaagtggaagcaatccggaatatgcaggatgggcattggttggcagtagaaatgaatcgaaggattcaggctgcagtaaacagtagcagagaaaaaggggaggaaggaaaatgacaggagaaatgactattgaaaatgtgattaacaggtcatgtattaaccttcacatgaagggaagggataagaaagaagtaattgaagaaatggcggagatgtttgatcgggccggagttttggtggacaaagctggatatattaaagctgtgtatgaaagagagagtgaaggtcctactggaattggagatcaggttgcgatccctcatggaaagacagctgctgtaggcaagactgctatggcagtaggaagactggataagggaattgaatgggagacgctgggagaaggaacaacaagagcttttgttatgtttgctgtaaatgataaagatacatcagagctggtttcattattatcacaggtagctatagcgctttgtgatgagaaggtaatagaaacattattaaacacagagagtgaagcagaaatattcactttatttaacagaaagggggagcagtgaatgaagatcgtaggagtagcagcatgtaccgcaggaatagcacatacctatatggcaagggaaaagttgataaagggagcaaaagccagaggccatgaatgtgttgtggaaacccagggaacgatcgggacggaacataaattgacatcagagcagattgcagaagctgatgtagtaatcctggcggtagatgtaaagatctcaggagaagaacgctttaagggaaaaccggtgatccgagtggggacggcagcagtgatcaaaaatgccatcggttttattgaaaaagtagaaaaagcgttagaaaacaaaaattaaaaaggagaaggactatgaaagaacatggagtgatcgcaattattaagaaacatgtattgacagcaattggttatatgattcctttagtagtagctgctggattgtgtatggctttaggacagtttattgacggagatgttcgtaattctacatcaggtattggctggtatctgtataaagccggtggctttggaatgtcggcagtagttcctgttattacggcgggtgttgcttattctatagcagacagacctggtattgcacctggcttgattcttggctttatctgtacggaaattaaagctggttttatcggtggtatcgtagccggatttttagttggctatctggtattggctgtaaaaaaatatgtaaagcttccaagcgcaatgcagggattgatgccggttatggtgattcctgtacttgtaacggcagtagcatctgttcttatgtttacagtagtagggcagccgtttgcatggcttcaggtaacgctgacagcagcaatcagtggtcttcagaatggttctaaatttgtatttggtgcagttttaggtggaatggcatgttttgattttggtggtcctgttaataagacaatgtcaacttttgtaaatggacttatggtggatggagttttagaaccagaagcagttaaatttgtaggttccatgattcctccttttggaattgctatttcctgtctccttaccagaaataaatatacaaaggcagaaaaggaagctttaaaagcagctgttcctatgggattttgcatgatcacagaaggcgttattccaatcgcagcaagagatttagttcgtgtggttttctcctgtgtatgtggttccgcagttgcaggtggtttatctatgatgtggggatgcggctcaccagtacctcatggcggaatgctttctgtaccgttgtttactaatccggcaaagttctgtctggcacttgctatcggcagtgtgataacaggagtcatcttatcattgcttaaaaaacctgtaaccgaggaagatgaaagctttgaagatttaggaacagagactggtgcagcttcagatgatggggagatcaaaatagaaacattttaagggaaatgaatgggagaataaataatatttaaggaggaaaataaatatgctgatcaatatggaggaaatgttaaaagtagcagacaaaaatcagtttgcagtaggtgcatttaatgcaacggagagttcactgtttcgtgcagtggtagaagaggcagaagcgcagaatgcgccggccattgtacaggtagcaccaggtgaatttgattttgccacaagagatttttatcagtatgtaagggcaagattatctaacagtaaagttccctttgttcttcatctggatcatggaaaaaccattcaacagtgtatgaaagcgatccaggcaggtttcacatcagttatgcttgatggttcagaactgccttatgaggaaaatgtccgcctcacaaaagaagtaacagacttggcacatatggtaggagtatcagtggaaggtgagattggaaccatcggagttatgagtaactcagatgaaggtggagtagaaaatgttacatatacaaatccggaagatgtcattgattttgtaaccaaaacaggggttgactgccttgcaattgcaattggaacagcgcatggaatctatccaaaaggatttgtgccaaaacttcagctggagctgttagagcggatcaaagaagttgcacctgtaccattagtccttcatggtggaagcaacaatccggatgatgagatccgtagggcatgccagattggaatccgaaaagtgaatatttcaagtgattttaaatatgcgttctttaagaaggtagatgaagtgattcaggaaacaggtggatttgttcctgctaaagtattgactccaggaatcaatgatgcaaaacaggtgatccgggagaaaatggagttatttggatctttgggaaaggcagaattatacagataaggacgggaagaaatatgatcaattttgaattttctaatacgacagaaattgtgtttggaaaaggtacgcaggaacaggttggagagaaaatacgaaaatacagtgactgtaataaggtactcgtagtatatggctcagaccgtattaagaaaaatgggctttttgatgcagtaagcagttcattgaaacagcagaaaattgatattctggaattgggaggcgtgaaaccaaatccgaggctaagtctggtgcgcagaggaattgaaataaggctaccgcaatcccactggctttagacggtgg

SEQ ID NO: 3550 - DNA, 401 bp, Unknown
  gut microbiota DNA sequence
cccgtagtaacatccaccgtcagcggtacactgatcggcggatagtttgctttcagcccaacccggatgccgggataatcatccgtttcccgtatatcagaaattccgacaaccgcaaactgcacatcatcggcaatctgtacagtacagatatccgtaaaaattttccggatcgcttcatgggtcagagtgaaccctttgattgtcgtgtccagatccatggttgcccgcgtatccagccctacaatagcagaaatcaggaaaccgcctttgagaataaaattgtttttatagggcgaaagcgaaattcgttccagcagtcgctctagcatatagttctgcatgacaagctgtgcagaaatatgcttctctgctgccttatttttgataaaggcttttaa

SEQ ID NO: 3551 - DNA, 688 bp, Unknown
  gut microbiota DNA sequence
ctatgcggcaaatatcaaggagcaggcggtctccggaaagatcattgatgtgaaaattaaagggtacacgacgaaatctacggaggaagagccgcggtttttggtttccagaagagattgtgtaaagtccgaatggatcggtatcgaggaacgtttccctctgcatagcaacattatcattgagtgtgtggagatgcaggggaaaaactggatcggaaaaattccgggagtccccaatatctctgtatactgtttttacccgaaccgtttatctccgacaactggcggaccgatcatcatcaagattggcgggcagtattcctgctttgtggcagccattgatgcggagaaatgtatattccgtgcccgggtgaaagatatggtggatcggagctaaatgaagcattaaataattcatttgacgaacgcacattattttgttgtaatttaatgtgtgttcgtcatttttgattgacattcacacattatttctgcataatataatgtgtgaatgttaaagtgaggtgagaaacatgaccaccagggaaaaaatagaagaacttctggaagcatcgaaggatggtacaatatccacatcccaggtgacggaagccggacttcaccgcggcattctgcaggagtatgttaagagcggtgaaatgtaccgttttggtcgcggcctgtatgt

SEQ ID NO: 3552 - DNA, 708 bp, Unknown
  gut microbiota DNA sequence
gcaccagggaaaaaatagaagaacttctggaagcatcgaaggatggtacaatctccacatcccaggtgacggaagccggacttcaccgcggcattctgcaggagtgtgttaagagcggtgaaatgtaccgttttggtcgcggcctgtatgtgctgagcaatgtgtgggaggacgatttttaccttttgcagcgtaagtatggacgcggaatctattcccatgatactgcactgtacctgctgggttattcggaccgtaccccggcgaaatatacgatgacctttccgaaaggctacaatgcaccgtctttgaagcaagagaacttgatcatcaagcgtgttgtaccggaaaattatgagtttgggcaaatccaaattaaatctttgtccggcaacccaatccgcgtttatgatttggagcggacgctatgcgatatcctgcgcggcagcggcagcgatatccagatcgtcagtgaggctatgaaacgctatgcggcctccaaagacaaaaatattcacaaactgatgaagtacgcagatcagcttcgcgtgaagccgaaggtcctgcgttatatggaggttctcttatgattacaaaaaatccaatgcagttaaaagcctttatcaaaaataaggcagcagagaagcatatttctgcacagcttgtcatgcagaactatatgctagagcgactgctggaacgaatttc

SEQ ID NO: 3553 - DNA, 11494 bp, Unknown
  gut microbiota DNA sequence
gaacatggcgatcaagtatgcccggccaaatggcaacctggtgcagaaaccttaaaaccaagccttgatctggtaggtatgctctgatggaaaaggaaaatttctatgatgtagtagtgatcggcggagggccggccggactgaccgccgcattatatcttgcacgtgcccgctatcgtgtccttatccttgaaaaagagaaattcggcggccaggtcaccatcactgatgaagtggtaaattatccaggcattgagaaaaccagcgggagagcactgacagaaaccatgcgcagacaggccgagttttttggagctgaatttctattaagggaagttactgcgctaaaaaaagaagaaactgcatccggagcagaactctgggaaagcactacagacaaggacagcttccaaagctttggaattctgcttgcaacaggcgcccatccaagaatgatcggctttccaggtgaggcagagttccgcggtcatggagtagcttactgtgcaacctgtgacggagaattcttctacgggaaagaaatctttgtaatcggcggaggatttgcagcggcagaagagagtgtattcctcaccaaattcgcaagccatgtgaccattttgatccgagacgatgatttttcctgcgcaaaagctgttgcagaagcagccaaaaatcatcctaagattaccgtcctgacaaataccgaagttatttgtgttgagggtgaccacatgctgcgcaggatctgctacagaaatagaaataccggaaaggaaactctctttgattctgcaaatgacacgttcggagtgtttgtatttgcaggttatgagccaaacacatcactggtaaaagaactggtaaatctggatccccatggatatgtgataaccgataagagccggcagaccagctgccaaggaatttatgcagccggtgatgtgtgccagaaaaatctgcgccaggtagtaacggcagtgggagatggtgctaccgccgctacggagctggaaaaatatgcggctgccatgcagggaagaaccggtatccatgcaaaacaggcggttaaaaaaggtgccgcgccagatgtaaaatcctcaaatagttttttctcacaggatatcataaaccagttaaatacggtatttgccaaaatggaacggaaattgcagcttgagctgcatctggattcccggcccgtgagccaggaattagaaaattatatgacagaactggcaaaatatacagataagttgactgtgcacgaacgcgtcccttctgcagagaccggtgcttcgcttccttttgtggatgtattaaccgaaagcggagagcagacagggctggcttttcacggcgtccctggagggcatgaatttacgtcctttattctgggattatataatgctgcagggcctgggcagccacttgatcctgtaataagagaaaaaatactggcaatccagcataacgttcatctgcaggtcctggtatcactttcctgtaccatgtgcccggatcttgtgacggccgcacagaggattgcttccctaaaccctctcgtaacggctgaagtatatgatattgcccattttccagatttaaaagaaaaatatcatgttatgagcgttccctgtctgattatcaatcaggataaaacctcatttggcaaaaagaacatccaacagatattggaattaatctgactggtctgcatctcttaaccttcccataagtgtttaacttgcagtcctttcaaaggctttcccttcgccgaacagggtttcagcgctgttgacaagcatttgtgaagcagatataataaaacggtactcatttttttcaaatataattcgctatgtgaaaggcatacgatctcatccgggattgatatgcccttttttatgcgaaaatgatgccgacaggcaatcatatgcgtcagcaggactgacatactccgctacatggcggtaaaaagcaaacaaatatcatatttacaggaggagaagaacatgagcgatgcatggaaaggggtaagcagggccagaaaatgccccatttgtcagcatgaagactggtgtggctattggacaccggaagattacggtggtgagctcatctgctgccagcgtgataaagaaaagtgcaatatgatcggttccgatggccaggaatatgtgttcatcggaagcgcaaaaggttccggcagttccatctatgaagaacgcactcagtacgaactgctccggaaaaagaaaaccggaatgaattattcgcatatttcaaaaccacaaaaaagggaactgaaaccggttgatcagattgtgcccaaaaacaatgaaaactgcagcagtatttacacctatatgcaaaatcttctgatccttgacccggcacacaaggcttatcttcatagccagggttggacggatgaactgattgaaaagcatcatattgtatcatttccagaagaggacagcctgcgggtaaagtaccataaccgataccgcaccagaaatataaccagagccaggcttgcagatctaattctacagaaatttggatcaaattcactcgaaggaattcccggggcgtatttaaaaggagagcagtggacctttgccggcccaagtggactggtatttccgatgtatgacctcgatgggaacacctttcgtcttcggatccggaaagatttttctgacattgatgcaaccgtgatcacttccggccaggatcgtttctactatgccgaaggtaaaaaatatttcatcagcatgaagggagtttactttgtaacccctggaggagagaaagaatttctcccgcaaaaaggaaaatacagaaccctggcttcctactatcaggattctcaggctgcaacacgtggaatattggccaacatctataaaaagggctgcgcggctgcaaaccaatgcagtttttacggccttccttttgccaaaacatcctccctttggtacatcacggagggtgagccaaaaggactatttgcatccaacgccttatcgactccggtggtaactcttcccggggtcaattcctattctcttattttagatgacggtgtcctttctcaaatgaaagaactgggaatgaaaatggttgttgttgcatttgatgcagacaagcttcataatgagcgggttttatcgtgcgaaaaatcactggcagacggactaaaaaccgctggcatcccagtcgtaattgcaaactggaaagaagaaaatggaaaaggtattgatgatcttctggcatccgggggagcacctcaatactgcatttattaagagaattcaatgaaaggtccatctcattagtgttttgctaataggatgaaccttttctcatccattcaattcttaatcttcttcaggaataccatatatgagagtaagttccacctcatcagctccagaccacttgtttacagcaatgtggtctgcgaatgctattgccatgtgcatttgtttctggtttgcagtaatatcaacgccatacttgctccttaatgttactgtcataccgccacacgcatcctgatcaattttaaggcagcatccggaaacagcagcaaattcattaagaatcgggaaaagagcctcattaaaccattttttaaatttcatgacctttttctcttctttttcctcttttattttttcaatagcttccttggcaaataccgcttcctcataagacagcccatccaccgcatcatacaaatcattcgatgtttcattactatagtcaaattcctgcatattctcttacctccttctaaccagtatacaacattgtgcatatatgcacaatgttgatttatccgtaattcagctatgattgctcttaggaggacttttcaatggttgattacagcccgttatgggacacgatgcagaaacgcaaaattacacagtatactctgttgaaggataaggtccttgacaatcatacgcttgaccggctcaaaaaaggccaaaatataaccttggtaacattagaacgcatatgcaaatatctgtcctgcacgcccaacgatgtcgtatcatttacagatgatgcatgaaaaatctgccactttctttggaagtttacgtttacgctgtaaatgtaaacttttttatttctaaactttgatgcagacaacaaagtaattttagcgggtatgtctgttatgggcatatcctctttttgttttgccaatcagcctcctggcctaagccggccagatgtaggtgaatgcaaatcgaattgacactcccgaagcaacccattatactaaaaatatcgttgagcatcctccccatataacatcgcagtttgtattgtccggcctgctcatcaaacattcattttaaatggagactcagaaaacatggcactatatgctctgggagatatgcatctggccttttccgtagacaaacctatggatagattcgggaaagtctggaaaaagcatgaagaaaaactcgaaaagaattgcagaaaactgattggaaatgaagatacatttgtcatcactggagatcattgctggggcaaaaatctgtccgaagcaaaaacagatcttgcttttatcgcagatcttcccggaaataagattttgctgcggggaaatcacgatatgttttgggatgccaagaaaactgcagttctaaatcaagaatatgaaccacagctgcatttcctgcagaataatcactatcattaccaggattatgcccttgtaggaacaaaaggatatacctttgagggaccattctacatcaattcaaaagggcagattgtcggatgggatgaagccaatgagaaacaggccaaaaagctggtagcgcgggaagcggaacgattgcggatttcttttgaaagcgccagagaggccggcttccgtaaatatattatgtttctccactatccgccaacaaatatcgtggaagaggagagtatcttcacgcggatggccgaagagtacggagtggagcatgttgtatattcccactgccacggagagtcccgttacggcgacagtatccacggagttcaccatgggatccggtatcacctggtttctggagactacctcaattttaagcctgaaaagatcctggattagatcttccactggaacggtagaatagcattatttatggaatttttctttctatatgctataatcgttgctcatctccataaaagtttacgtttacggcgtaaacgtaaactttttgttctaaaatgcctaaacaactccaaatcaaaaatatttgccgtacttgtctgctgaattatcacatgtgggaatcagtgaccacgtgcactttaaattcaacatatatcgtgaaattcattgtgtattcgcctaattgcaaagtaaaattgatgctgcatgatatagccttgggcaaaaatgtccagggctatttttatttacatttctcgcaataaaaagtttacgtttttcactaaaaataaactttctattgttatgtggcctgtatgatgctataatacaattaaagtaaacgtaaataatgtaaacgtaaacatttatatcaatcaggagcatcccatggaagaaatcaaagaaaaatctgccaaaaagccggtcagcatgcgcttgaccgcaacagcatcggaacggctgatgcacatcattgatctgtataaaaatctggaagacccaaaaggcgagcagcaggagaatgctattctgcgcattcttgatattgcagagtccgacaatatcagagggacacatcctgagttagaaggccccttactggcagttgaagccacgatctctacattaattaaacaacttaatggtatagcagtcggccaggatgccaaaatttctaggcttcaggaagcattaaatgctgcgattacagaaaaagaacaggctattgcaaaggcccaaattgatatggatagggcccagcaaaatactgatttggctaacagactccaaaaagaggccatggatacgatgaataaagcagaggaggatgccgctgcccagattgaagccataaaaaaagaaaccactgctcaaattgaaaaagtaatgagtgaaaaagagcatgcatgccgtgagcgtgatgatgcccgcacgattgccaatgaaaaaactgccagcaatgatcttcttctcaaaaaaatgactggtatggaagccgatctggaaaaatacaaggatttacaggagcagtacaaagagctccaggacaaattttcagccctacagtctcagttaaatgaaagcaaattgcgtgcggaaattgataaagagcgcgccgtcatggataaagagcgtgaaatgcaggagcgtatcagagaagcggatagagaaaatgcaaagctgcaggcaaaaattgaacaactgtcacctgcagaagcctcgccaaagtaaatatttttaaggagccattcatgaaaaaatcattagatcgtttcctaatagcacagcagaattactatcatgacgcttatgaggaattaaaggtaggtaaaaagagaagccattggatgtggttcatattcccccagattcgtggtctcggatacagtaatatggcgatatactatgccattgaaagtcgtgaggaagctgaaaactatattacggatccaaccctcggccataatctgattgaaatatccactgtcctgctggaaattaaagacaacgatgcaaagaaagtaatgggtgaaccagatgatagaaagctccagtcctgtatgaccctatttgatactgtagctccggaaattgatgtatttgaaaaagtactcaaaaaatttttcggtggagaaagagataataggaccctggaaattctgcagagttgtgatcataggaatgaataactgagtcaatcaacatataaaagcacattttcattcttgcataagcaaaggctaccgcctaacaaataccagtacggcagcctttgcgattattcctagaagcccactttttatcatttattgaattttcttttctcattgtaataacacaaacttattaggtaaccaaccactccaaaggagaaacacttcattattccgtatgggagtcatctcaaaagatacgtcggaatttcagataatctgaaaaaggtgaaatgccccgtcataaatatcataaatagatatagcaacattccacatagaaatcccttagctgcactcttcaatttcttattacaagaaatcatcttaactgcctcccttcaaatttgaagttgctgaggtttcagttaagttcatttccttcagcatcaataaaaacgtactccgataggacagatgaacaatagaacacatacggataggcatctttttctatcatttcttcatgtgtacctgcttcatccgtaatttttacagaaacacaatttggattgttcacaataaaggcatacccacgattccagttcaaaacagcaatatccatgaaaggagacatcggtttgtatgtccgaacataagcatattctgcttctcctttgatttctacttccataggaaggtagtaatgcgtctgatattgattgccagaaataaaccaaacgagtgccgtatcatctacggtacacatacctccatactgcatatcaatcgtatccgcatcggaaactggaatttcttctctggctttttctatcagttcatccgtacctttatatgtctttgtacagcctgaaatagaaaaacataatatgcaagtcagtaaaatgcatgtgattcttttcataaaaaacacctctgcaactccctattttacattcctaagccgacagaattctcacgttctccctccggtaacacctgcagcgcatcctgcacagtactgaacacacgctcattcagccagcctccctgttttctgttctgggccgcagatatcactgggtactgccagatggtcttttgatgggtgtaattgagccaggaatcaatccaccagtcactttcctttgccttgatttcgtaagccacgtatccgcggcagttttccccgcgatgtggcatggaaaattctgcaaaaatgctggcatactgctggcttccgtaaaatggaaaattctggttggtatcgtatgcttcattttgtaaagacgcatactctgcggtgtaagaagtcccatccttatcgtaaaggacctggccggtaagttctccctgggcagtccaaccgccgttcaattcctggtatgcaggattgatctgcactgcctctgtcccgcgaaagcccgaatttccgttccataagaaatgatggattaccttccactgcccttcctgttccagttccactgccacgccgtcaagctgcagccgctcatccccgtcccgcagcaaatcatcgctttgattcagcaaaatctgtctggcatttttgcatgccagaatatcttcttcctttaaatcatgcaaaatctcttccggaaaacccagggataacagatgtgctttgatttcttcactcgccgaatcctgcgtttcttttgcagttgtccacgccatgtgataggaaccaaaacatgtatagccgatgagcaggcctgccgcagtcagaattgctgctcccgctgcgtatcttccatctgaaatccgcaccggatgctcttccagtacatattcggcctgttccagtttttctgctatattctttaactccacaaggattccaatatatgcggcaacgatcgccaggccaagaatccagccctcatattcccgaaccgcaagcacggtcaccaccacataccagatgatgatatggagcaggacctcattttttatttccgccttacgcttttccagttcctcacgcataccaaggaagagacaaaccatcagaaaaaccggcaaaattccgccacagaaaacaatcactttccatacatatgaaacataaattttctcccgttcgagcacacttccaatcacaatgttcacgatggtaatcacaactttgagcgcggcgcctgcgtatccggctttcagccagcggttttccagtctcagttttcggaatcccgtaaacagcaaaagggcaccaaggaagggaagaatctgattgagaaagagaaaattcaatgtaatcccaaagagacccattccaatcagaatcttctcatatgtctgtttccagaaactctcttccatgtaatcgcccctttttcaaattatttgttataaatatggtagcacaaaagtgaacctttatctttaattctccattacaaaactattaattataacaaacgataaccagatattcatacagcgataaacgggcattcataggaatattgacttttcgatgaaaatataataaaatgtaggcagctaagaaatgtgatgatttcccatgcggcaaaacgaaaaccccagagggtgcctcctctggggttttcttgttcattacggcgaaccgaccgtttaggctgttgctgcctatttatctctgtccagccatttgcatatgtagtagctaactacacctgctaaaacagagacaaaaaatgtgatgataaaatctcccatccgactcacctcctttctgctggaggttcggcagcctttttagcatagcacatttcttcccattaatctacataagttgtcataccatcatctgataatccttgatttgccccaaatccaatggtaaaatactcatagattctttcatttcaacaacatttgtctctgacaaagcgcacgccattttatgaccgaatgagtgggggaattctggaaaaataaacagaataatatgtacgttggaggaacttcctttgggaggttccttttttcgtgcccaaaaggaggacttagcctatgaaacttacaatcagggatcttatccggcttcgccactgcgaaagccactaccgtctcggaaagctgggattatatgctgcatcaaaacgtacccagtttttttatcaaaagaaggactctttaattttagcattatccaaagggcctacttcattttcagaagcactcgaaaaagcatttctggaatacagcagagactggttccttaataaccgccagtatgaaacctgccgggatcaggaccttgccaggtggcatcgctttgctgactggttctttgagcagggttatcagattttgaagaccaggctctgctcagcgatttcagtcaatacaagctgcaaccacgtagcggtgtctgaattatctgcacaagcagatctggttcttaaaaagggggagcatgtctatgctttaagtattttcccgaatgaaccacagtattctgtgagagccaggaagcaagagacccaggcatattacagcctggaactgttatcacaatacctgatcagcgctccagcctatggacaggaaacgatttccatgatctgctacttaaaatccaaagaggataaggctgattttctggcctcacagtatacggaagggaaatgctatcttcaaatgggatacggcgggatagcggaggccacccaggctctcctgagcacgatccagctttccgtacctcaaaaatgtgaatactgccgctatacagatgtatgccatcagcagaatacttccgcattggcaccggaaaaacaaccagaagaaacttccatccctgttccagcggaaacagtcgatttagagaaaggactgacaccggagcagcggagagttgttgaacacatggatggccctatggcagtcatcgcggtacctggtgccggcaagactcactgtctgattgcacgtatggtacgaatgatcaaaaacgggattttgccggaacaaattctttttgtcaccttcaccaaaaaggccgctggcgaaattctggaacgtgccagacgggtgctcggtgaagaaagtgcattgccggccatctttaccttccacagccttggctacacgattcttcgcaaacatgaggacttcataggaaaatccttaaaaattgcagagaaggtagactactatcgtctgattttgcagatcattgatgaaatctctccattgtccggcattgactatgacggactcaccggtgatttcggcctgctgagcaggatttacaacgctgtactttccattgagaaagacggactggaagagtggaaaaaacatgcggattttcctgatccggatggtttagggtgcctttatcagaaactgaaggaacgaatgaaagaagaggggtatatctgctttgatgaacagatccagcttaccaaccaactgtttagcgaatatccagatgtattaaaaagctatcagcagcgttttcgctatgtaatgattgatgaattccaggatatctcgtcagatcaggtcgatctggtatacgccatcgcatcccatggaaatattgtggttgtgggagacgatgatcagagtatttattcctggcgcggaggaagcaactattacctgcttcatt

SEQ ID NO: 3554 - DNA, 17020 bp, Unknown
  gut microbiota DNA sequence
catacgccatcgcatcccatggaaatattgtggttgtgggagacgatgatcagagtatttattcctggcgcggaggaagcaactattacctgcttcattttcaggagatgtggagcaacagtaaaatcgtgattcttccagataatttccggtcggtagaccacattttggaagctgcaaatgcgctgattgctaataatacgaatcggtatcgcaaatctctgcgttcccatcaccgcgctacggttcggccgatttatcggaaaaatgttctggtagataccatccgggatctggttgcatccgcagaacgctctggttataaacctggagatattgccatcattgcgcgcaaaaataaagcgctggaaaagatcaaaaaaagtttagatggtttttaccttgcaacttcacccaaaacattactcataaaggatgaggtatttattgccattcgtgacacattttctctctacgtgaccaattttcatgatccactggcgctttacagacagctgaaacgtaatggatatgaactggacattcctgtcgagcgagaccacatgttggaaagcttcttaaaatatttcaatcttccagaaccagatttatatgatccggatctgcttgaaatatatgaagcatccggcagtcccggtatcgcacttgccaggacactttcttcctgtaaaaaacttctgtatgcccaggatctgtccgatgccgttcggtccatttaccagtttctctggcagaagaaggaacatccggcagtagaagagttgtgctcccgcatcgaaatgcgggctatcaatacggcttccgaatttcttaaccatatgaatgccatgatcgaattttctgatacagcagaggttgaatatcccgcaagccccgatacgattacccttcttactgctcataaatcaaaagggaaagaatttcccaccgtagtaatttatggagtagaagagtttgaagaatcagaagagggccggaacctactgtatgtttccatgacccgggccaaacgaaacctctttcttttgcagggtagtttttccgatgccccactgtatccggagtttaaaaactatgtcgattgaccgctgccgcggcatcttgttcacgcacagatattgtgttaagatggggtatggaaatagtgggggggaaattacatagctcccggtcaccatagaacccttgatcgaaaaaaatactatatggcatatacggaaagtaaaaataaccaggaggaaaaggattatgaaatttgagtggattgaagaaggggacggccgttaccgtgtccagttttttgacatggatgaaaagaaggtattcgacattaagattaccgactatagtgatccgtactggcagcaatcagacctggaacggaagattcgtcgcgaatgctgctatgacgttatcttctatgccggacaccgcaagagctactctgacaacccgaattacgaaacggaatacggttttcagggtaaatcagaacatgacataatatatatccgggaactgtgcaaaaattttatagcagattcctatgtttttgattacgaaaaagcattgcgcggccttcaaaagaggaaggcaatgtcagattggtttctggccagtggttataccggagattatgaaggaaagcaggaatataaaagatctattgtagttgacgagcttgactaaaaagcttactaaattggttgccacatcgtcatcttgttcacgcgcagatattatgttaatatggagtatagaaatagctcggaaaggaggatttcgcgatgagcgaaaaagaagagatcatattcatgcagacccgattggtacgtttagcatcaaaggaatggcatcttcctgtggatgagatttttaacatcttcggaaaagcagatgtacttggctatatcgaaaaatgttatgggatttttcactgcgaaggagatgatgctgtattagaagacatcacggaatttcttcaaagaaaggggatccaaattagtgcttgattttacagatgggcttatcctttaccatggcagctattgtgaggtaaagaagcctttattggaaagatgcgccagacgaaaagactttggaccacctccaaggaccaggctattcgttttctcaagacttccattgctaaagcattcgcaaatggaagcattaaagagaatcaggattatggctatctttccatctttcagttaagaccttcaccagaattatccacatatgcatttgatgatgcaaatgtggaatggctgcactgtgttgcggctcatcgaaaaagacttttgtttctggatgttgaagatactatggcaaaatatgatattattgctgggaaaattgcggatgacgcgacaaatgcaacgctggctgcatacctagtcggcgcctttggaatagccggaagcaaagaagctgatgatttttgtattaaacagctacttccgaataagttaaaggatcagtattgttttaaaacaactgcagcgcttgattgcctgcattttgtggaaagcgagaaaatatggctgaagaaatgatttcaaaagagcgaatagactatacgattgaccttcttattaccatggccgtcgaagaaattgcagaagatacaggaaaaagtccaaaggaaatattgccggaattttattcttccaaaaccggcaaggcactttacgatgagcagacccgattatggtgcaatggcccatcctatattgccgaattatacatggacgaactctccaaaagaaagatttgagaaaaagctgtttctaacgtattatgcgtttgaaacagcttttctgattaacagacctcccggcactaaggctccttcttttctgtccattcttagctccttcttttctgtccattcttggcgttgcgctcacctttgatctatgttaaactatccttgataaaatttatttcaaacacaatagactctgtcttcgtttcaagcacattgcttattaaaaggggatgagtctgcacagatgcggaccaaattagaggaattctaatttggtctttttttgtgcattcacaacaaagagaggaggaacctatggctattttacaactgccgtacaatttgtctgcgctattcaatttcaatgaaccagacacaaatgagggggcgatggaatcttcggatgaagattttttcgacctttttgattttctgccagaaaatacggtgactaccaattatctggccaaaggagaggaccggatccagtcactgctccggatcaaaacccgccggacttattccatgaatgactttttcaaattattttccagagaccaattctggaaaaagagcaacagccgaaaagatttcacggaatatctgatcaagacctactggaaaaaggtgatcgatccttttgtaaataccctttacaaagattttctggccggtcagatcacggaacaggagatttctgaaaaactgcaggagattctgggatttagcatttctctatcgcaatgccatgatgagcaggtaacgaggctggttggagcaaccggtatgccaacggactgtatttttcaaatgactgtatttgaaaatgaatactttctggtcttcggaaaactaaagcccagaaaccggaaccgcaaaatctatttgaaagacgataagagaaaatgtatcttatgggattcctattatcttgcaacactggcagtcatagaacgtatccggattgaatacaagcgctacatccattccattgagtctaaagaccatgacctggtctatatgtccattctggatgaaattgcccgtagataccaggcttttgggaaaatgtgtaccgtatatgcttatgaaaaagagcaggttttgtatccagaagtcatgcaattttttgacaagctggaaattcctgtaaaggagcgaatagccggccaacaagcgcacggaattatatttcaattttcactcctgcagcagatcctgccgatcttaaatcagtattctatcagcacagtggattttctatgtaatgataatattccagagggatatctcatcattataaaagccctgatggaacagcacaaaatgcaggaagcggatgagcgctatcatcgaaataacacagaggtagccaatgcatttatgaccaaaaagaatattccgccaaagcatcaggattacatgaaagagagccgtttcttaacagtttaccgctatatagaggtagacgaagactgtgatcttgacaaaatgcaggaactggaaaaagaatttcttgctcttggggatattttgggaaagcatccctatgatgcttccattcgtttccgcaagcttggccgacaccatgcttccggcctttattccccggcctaccagtgcgtatgcattgatgtccgctcccctagcagctacgtccacgaatttctgcacatgtacgatcactttcatggaatgctgagtgaaggctatgatttcaaagaaatccggcttcagtatgaggcctgcctgcaggaatatctttcggattgtgaagatccggatttaaaagcacggctgaatggaaacagcaaatacaacctggattactatttggtcccaacggaagtgtttgcccgctgcggggaactgtattttacgcgttttcgtggtgtacataattctcttctgaaatttgaaagaggatttgactatccggaaaacgaaaaattattggagctgatcaaaaaatattatgatcagcattttttaacggaggagatatcattatgaagaaattttttatcaaggacctggccaacatggtcgaaaaggaaattgcaacggagtttttacttcggaatgtcaaattgtcgatcgcggatggccggcgctggcaggaccttacgctcagtgataagagtggtattgtatacggaaaatgctggtccgaacacatctcggatgaaacggataactatgttggaaaaattgtccgtgttgtcggaaaagttgagcttttccgggagcagtgtacgctgcggattgtccggatcagtccggctgaaacatacgatccggcagatttccgggttactttgtccagctacgatgtagaacaaagtatcaccctcttaaaaaaactcctcgatgaaattgaggatcccaaattgtatagtttatgctgcgctgtattcggtatggggactgccagatacgaacggtttttggaattcccactgaccgaggaagccacacatccatactttggcggttttttaaagcataccatcaatgttgcaaacctggctgatatggcgcttactatctgcgaaggcagcccaaatgaagtgatccggccggatccatcgctggtcattgccggtgcgcttcttcacgcaagcggcgtgctttcccagctcacactcagcgctgcggaaggcatcttcacggaccgggcccgccttttgagttcctccacagatgcggttttaatggcagtctgcacaaacagccgattagaacaggagaaacgagttacggatatgtccgcacttttacatattctggaagctgccaatggaacgacaccgcctaaaaccaaggaggcagttattgtcaccaacgcagtacgaatgagcaaagagctgaattctatcgatcagatctttttcgagtctgaccgtatgcatccgaccgataagacccggaaagctttctgcgactatctgggttatgaggtctttcgaggaggagaggaatgtttgaaaaactgattttaaacccatatgtgaaaaatgctctgaagcaatacatggacaaaggacaaaaaaatgctcagcatttaattctgtcaggccctcagggtactggaaagcggacctgtgcagatatcctggcacactttctcctggacatcagacttgataagccactccattcctgcgcagattttttctgtctggactgtgaccaggcaagcatcaaattgtctgatacggaggacctaagagaatttatttcctattccagtactgtgcgccgcgttgttttgattgataatgcgaatcagatgaccccaaacgtggccaacagcctgctaaaagagttggaagacgggcaatgtgtattcatttttatagcacacaagcctttgatccgcacggtatgcagccgatgctttgaaatccgttttcttccggtaaatgaagatgatatggcacagttttttatggaacagggagatcttgtatcattagaggtggttacagcttctaatggctgtcccggactattccgacagctaaatgctgatgacgctttcatatctatgaccgccagaatgataaaagcactgaaccaacaaaatcatgcggatcttctgtcaaccttcggtctcctgaaagaaaaagacgaatttgctttggaagcattttcaccggccgcccgtctggcaatcgtgaggcttttggaagccatctatgcagatcaatacctgcataaacttgttggaagcaaattattcccgtatatgacggaactgcctatttctgctaaacaggcttaccagatttctgaacaggcacacaatatccggggcaaaaagctactctacacaaaacatgattttctggaactcctgttccagatgatgaaagagggggaattatgactctttataccaagatacgcccaaaaaccttcgatgaggtaaaggggcaggaatttactgtaaataatctgagaatgcagtccatccgcgacaaattctttcaggtaattattctggccgggcagtacggggccgggaaaacaacacttgccaggatcgtggccacggcagcaaactgtaaaaacaaagataagaatggaaacccttgcggtacctgtgatggatgcagatctgtatctagtggatctgtagactttctggaaatcgacggtgccagtaacaccggagttgatcatgtaagggacctgacagactggctacacgagcgcccactcggaaagcggaaaatcgttatcattgatgaggtacacatgctttcccgtcaggctttcaacgcccttttaaaaacactggaggaaccaccagcttatgcactgatcattctttgcacaacagaagcagaccggatcccggcaaccatccggtcgcgatctgcctgctataccatcacgcagatcccagaggccatcatctgtgaacatcttcttgaagttgcgacagaatttcaaatccgtattcagccggaagctgcagaactgattgcttcctattctggtggtgcgatgcgaaatgccttaaaactgctggaacagctatcaaatggcgaagatgaaatcacggctgatgtcgttcgatctgttctcgggatgtctgaaaaagatgagctgctccgaatcatccaagcgatgctttctggaaattacacaaagctgctggaatctttaaattccattgccaaaagcggaaaatctcttctaagccttacggaagagctcctaaatgaatccacatccttgctgctggccaaaacagggcagccatcatcatcttcagctatcgcagaaaactatacactagaacggctttgcgagctgtctgctaaaataaactggctgaatgatgaactaaaaaatgctgccggcagcggaatagcagcctatatccatgcgacaaaagatctgaacactggtgaatcaggtcttgctggaaaattaaaatcattggaagatcagatgttcaggctgtctgccgaactaaagtctataaaatccgtcggattttcgaaaccggtcgatacggctctggaagcagaaaccaatatcccgataacttccaatagctctgctcagcccgacttacccgaggagagtgtacctgttttaatcactccttccaaaacctctgaagttgcgcaaacagaaactacagattttgacgcactttttggtgactggggctttgactcctttgataatacggacgaacccggattttttgaaagtgcagaggaaactggcacttctttccaagagacagcaacagtttctgaaacttctgcggctctttctgcgggagaacttgcacaaaaaagtttgtccgagagaatcagcaatgaccctgtcataaaggaaaaacttctttctgctgagtggatcacgcaggaagagaaccttttacttaaggtgctgccagaatacaaagaagatatcctgttatttattgctgcaagtggcataaaaaacattacaatctgctaactacacagggaccatgaaccgcaattgtttatggtcctcatgaatacttatcacacatgattacggaactatactgtaaaaaattttatttagaatagggggatatatatggatttcattgatgatctggatgtttctataatcgcaaatatacttgtaaatatgggtattgacattagtaatttaaacgatattactgatgccgatgactacgaagatacaatttctaccattactgcataacttgaaaaattgcgaaacgaggaagatccactatatgtgcttcttgaactgattgctggagacaatgaagaattggtggatttctattttaaaatggttggatttcactaaggaacctagaatatgcacaatgattgggaagcccattaacttccggccttcaacacctaaagtgcatatcatttctacacagcgttttcaatagttagtatgtatagactgataaactgcagccaattataaaagctgcagtttatcagtttttcttttttatacctctcacagtacttatgataccttacaaaagagtcaatcttaaacaattccccttctactttcatttgtcttgcaggaaatccactctttctgtataatataagctagggtttattttttagcttttaggagcgtgaataatggaaaaagattcagatttattaaataaaaagaaaactgttcagatttcagtaacagataaagatggaaaagagcaccccattgatgttgaaaccgagatggtacctgttggtcatgagatcaattatcaaaccgaaaatgagtggtggtcaaaggatcctgaaaccggaaaagtatatgcgccaattcccgaacattatgccctgcactttcaggaacttcaagctcgtatgaagtctggcccacctttgacagaaaatgaaaatcgtgtatatgaggctctcaaagtggttcttcaggagctgccggtttttgccgctgataacgcatacaacgcacaacctaatgcatcttctctagaatccatagaacacgaaaccaaaaaaaggaccaaccgaacaagaaaaaaagactatgtcgatacttcattgaccaagcacatctccctgatcattgatcaggagtatgaatctggtttaagtttacgcaaaagcggaagtgcatatctaacacctctggaatcaacagatggcctcaattatgatgctaataccggaaaactttattttgaaggagtacctgtatcagaagcaaaactggaagaaattagtcgtggtaaggttgttgaaatcggtgaatttgatctgcccttattaaaactattttacagtattattcttgccgatattaaaaatactatcaaccaaaaccagtatgcgataaacgaaagttttactatttacttacccgatttggccgaacttatggggaaaggacgtaatttaagtgataatgatataatcatgctgcgaaataagacaggagcattccaaaccatctacgggattattcgcgatccaaaatatccaaaacgaatcggatccgctttaccgcttttggtttcactgggttatgatgacaccacgaacacaatacgtttttcctctccctacatgcttcgcttaattcagacactgtataatgtaaaggtacgacagtcaaaactcaacttaaataagattactgaacctgcaaagttcttaatatcagaacataccgatatcatttatacatcaattgctaaagaaagaaataaacgcgccgtagagattgttttcgccattgtgacaatgattgagcaatctacagacgaaaatgtatgtatcaccgttcgggatatttttgatcgctctcctcaattagtagaagcgcttaacaatacaatccgtacagcgaataaaaatactctattaaagcgtgctttttcgaaagcttatgagttgttggaaaaaaagactacattgaaagagcattatccttatatggttttctctgaagaacttttgggaattccaactgtaagtactttaaacgaaatgaagctgcacttcatcaaaaaaaagtaactcgaaccgaggacatactgttctcggttttctatcatgtggtggctacataacttcaaaccaaatatctttagtaatttttagaaaatgcattaaccgatcaactgcagttcaaatacagatacatttttgcatagtatagtaattaaacagctgcagctcagatacagccacttttcggagaactgcgctatctgaacagcttcgactcagatacactacttttcggtaaactgcgctagccggtcaattccagcccaaatgcagctatttttcggtaaactgcgctatccaagcggctctacctcagatgcactacttttcggagaactgcgctatctgaacgactccgactcagatgctccacttttcggtaaactgcgctagccggccagttccagcccaaatgcagctatttttcggtaaactgcgctatccaagcggctccagctcagatgtactacttttcggtaaactgcgctatctgaacggctctacctcagctgcgttacttttcggtaaactgcgctatctgaacggctccgccccagataaccaacttttcggagaactgcgctatctggtcagttccagcccaaatgcagctatttttcggtaaactgcactagctaaacagttccagcttagatgctccacttttcggagaactgcgctaatcggcccgtttcagcgcaaatacaactatttttcaataaactgcagtagcctttcggcaaaatactatagcttttcggtaaactgcgctaagctttttcggagaactgcagtagctttttcggtaaactgcggtagctttttcggagaactgcggtagttttttcggagaactgcgctatatttttcggagaactgcggtaaatttttcggtaaagtgcagtagctattttcggtaaagtgcggtaaccattttcggtaaagtgcggtagtttttcccggaaaaacccttattttacaatacttcccccattttcagtcttattttccccatttattttctcattaacacatctcacaaaacagtccttttttacccgttttcccacactttggcaatattccaaatttttttatttccctttataattaacattacattgcggaaagggggtggatccagagtgaaacgttttgcgaatgtaagcattccatccataaagaaaatcattcatacttcattcgagaagcagctattaaaaagctgctctgttcggctgttcattctgatccatttctatgccaacgcaaataccggcatcacttcaccactcgatttggaagatctggcacaagcacttgattgtaacatcaaaaccgttcgcagcaatattctccggttggagtcctgcggcttttttgatgtatctatggatccggtcacagaagagtatacctttacaatccatgactacaccaaaatgtataatcctatcggtcttggcggtggttatatccagtgtacatatgatttgcttgagcagctcctgcagatcaaatccattaatgagctacgagtgatccttatgcttctttgtgaagcgatcaccactgaacttcagagttctgcaaagctggccgtggccaaactcacatttaaagaattacttgccggtttaccaaaatatgtaaaaccaggtgtggtaaagcagattttggatcatgccaactccttcaaaactatttttaaggaagagtacaccaggaaaaaacgctatattgctgcaaagctcaatgattgttttaatggagcgactaccaaaaaccaggtccgtcaggaagcctactccgaaattgtttcttttaccactgaaatggatgatgtgatccgcacctttaacacttacctgtttgaggacaagttaagagagagaatgcagtatgaggagattctgaaaacagaatatggcattgccttcgatcagacacctaccctggatgctgagcatttacttcctatctatgattttgaagaaactcagtatcatgatcttaccatcatggcacaggactatgaaattggtacggttcttgatgcactgcaccttttctataaccgttatatcctcacaaaactctatgatgcaaagaaagggcctggctcgctcgttcgatccatcataagggaattaatccaaaatccacaaattgcataagtttcgcttcaccggcatccgctaggatgcctatttctcgttccattctgtattttcatacccgttttctgggtaatttttttcctatttattgcttttcaatgtgtatttttttcagcaatatctaaatttccaggtcggttatccacaatttcttttatttgatccagaaaaaaatcaccctttttataaaaaaaccattcttttcatcagaaaatcatctttctcaaaataaaaactgcatttgcttctaaaaatcggctgatccaaaaaataatgcctgaaatagctcctttgacagcagaaaattactcatgtttttacatgtcttttatgtctttgaatttttttatgttttttagctcttttaaataaaacgcgttccgcgactagccccttacggagagagtgattgtgaagaggaaataaatcatccaaaagaaccttatttcaactctatcagaaaataatacctattgtttgcaaatattgcctgaaatatctatcgggaatccctatatatacgccaaagagatccatgtcttctatgtcttttatattttttatatttatagaatgtcagctgcacaagcatatctgtttgattatttgctttttagtataacaatccttgctttggaaagaattcaatggtaaaataattacaaattctttcatttcaattatatttgcttctggcaaagtgagagtcagttaagaccaagtaatggaggaattctgcaaataaacagaatatatacacattggaggaacttcctgtcggaggttccttttttcgtgccagaaaggaggacgatgtcgatgaaacttatgaaagtggattttatccggttttgccgcgatggaatctttatttagttgtttcaatcaatatgcaatgacctgtgaaaaaatgatttatttttaagaaaaccaggaaaatgaaaacaggaaagagaggataactatgaaagaatttaaaacactgggatatgactgggaatgtggccatgaggatttgatcatcagagtattatcctatgctgacagaaaacggctttatattggattatacaaagaagaaaacggagaatgggaggactttggtaatctgactgtaaatctgcctcatgaagatgtaaaaaagaatgaagcattcattgatcacaattttttcgagtccaaattgcagttcattaaaaagtatcagctgggagaaattttacctgaaacagccgtatcaggatactgcactttttcgaaggtagcatttgatcttgaccggctggaagaatttgatccggacggagtatgcgcgtaccgggaactccacggggaaaagagctcatcagaggatgaagaagaggatctggatgattacacgttaattaaaaagatgcatgatttaacggaacgttatctgacactggatgatggtctgtcatctgcagaaaaagcagctttccttaaggtggagatagcagaagtagcgtatgctttctatataaataacgttttctcctgagaggaagaagaagtattccgtgctatttccagattaaatacggatcttacggatatagcggctggctgaaaatagtcagccgcattttggaaagcttctatcagagtctaaaaatcaaagcgcagcactgagagtttggtgtggccttagatctgttgacaggcattgatggcaatgttatactcccattaataatagcttttcatgtaagttatttttacagagtgtgggtttgtgactgcatctgtattgaaatgggattcttagattaagtcaatgtgaatgttacattggctattttttttcaaaaatagaggaggaaggtgtgcgatgaaaggcacagtgaatggaaaatctttggatcaggtgctgagtgaattgaaggcaccgtttccagaagaggaacttaagaagaatgaaaaaaatgaaacgtatattccggttgaaagcctggagagccgtttgaacagtgtcatcggggttttaaactatgatactttggttacgtatgaaggtatccaggaagttctcgggcgctttgtggtagtggccaagacgattctgattatctatgatgatgaacggaatgccttgatccgaaagtctgcgcttggaggcagtaatatcattgttgtcaaagatactggaaagccgtccagtttaaaaacggatatcgcagctgcacaatcggaaagtttcaaaaatgtatgtaagttgcttcagattggtatcagccagatcaggagcggcaagcagcgcagaggacagaatggcactaagcagcgcagggaagaaaagaatttatataaaattcgttttacgtcttccctttctgcgggtaacaaatgctataaggcagattgtgtggatatagcgacagaagaaaagttcctgttcgtaatttttagtggtcagtactcaaagattgagaaatatgtagagttttcaaaatttgtgcgtacctaccgggaaggaaaagaactggccttttatggacgtaaagatgaatttcatggccagcgacgaattgtttttgaggaaccatctgtaaaagaataaaaaataatgaaatggaggatagagcatgaatcgagttatattgatgggtcgattgaccagggatccggaagtcaggtacactcagggtgagcgctccatggccgttgccagatatacactggcagttgaccggagaggagcaagaaagagccaggacggaaatgagcagactgccgattttattaatatcgtggcatttgacagagcaggtgagtttgcagagaagtattttcgtcaggggatgcgtgtactggtgtccggacgcatccagactggcagttacaccaacaaagaaggtcagcgtgtttataccacagatatcatcgcagatgatcaggaatttgctgatagtaaaaatgcgtccgctggaggaaaacaggcaccagaaatgggaaagccgatcggtgatggctttatgtcaataccggatggcgtagaagatgagagtttgccatttaactaaatatgtgcatgctagaggaggttctgatttttcagagccttctttattttatgaaagggaaatgaaaatgaagcagtatataccggatattacagagcgctttcctgaagggtatggcggtgttgatatgacaccggcctattttggagagccggttgactggagtagagcttatcaaagagaaaaggaagattatgaagatcgagatattgatgctgaaagagaataatgaacgcggggtaagaatgatgtttctttcactggagcagcttcagaaattgaagcttaatcctactcgcgcggattatgaaattgcttatgagacggaagtgaaagagcaggagggaacggcattgaatgtatcagaaattatggagggtctgtatgagagattaaatcgcccagatcgtcccaatagaaaaacaatgcgttccatgtcggtaggagatattattcagatcgatggcaaagaattattcttttgcgattctgtgggatttaagaaaatttcttttgctggtacgggggaactcgttttgaaggccgggaaagagaactcagagaaaggaaaataatcagatcctggtagaccaggttgcgatgagagtgttgtacttcgcataaagcacctgaaaacagcgtgaggatcaggaatgattagtagcatgggaggctacaggtgctgccatatccagttctggaatatggtgattatggaaaaagaaaaacgatatgttgcctccatctcaggaggaaaggactccatggcaatggttttagggcttatggaaaagggctggccgttaacgcactgcgtctattttgataccggtatggagttttcatgcattcggaaaaatatagagaaagtccgactggaattggagcagtatgggtgcgaacttgttattctacagccggaaaggcatttcctggaagaaatgctccttcgacggatcaagtgccgggacggatcatcgcactatggaagctattggtgcggtgggccatgccgctggatgacacgccttaagatcaatgcctgcgaaaaatatgtaaaatcactcggagcaactgcggtggaatacatagggatcgcagcagatgaatctggccgagtaaaggaaaagtgctatccattggtcgaatggggctggactgaatatcagtgccttcagtattgttatgcgaagggatataactggctggagggaggcatagagctgtattccattcttgacagggtaagctgctggtgctgccggaacaaaaatttgcgggagttgaatgcaatctatcataacctgccgcagtattgggacaagcttagagctcttcagagttatatcgaagagccatataagccgccgtatacgattttcgatttagaggagcggttcgcaaaaaagggaagacagcggggactctgggaagtataaggatcttgcggag

SEQ ID NO: 3555 - DNA, 72045 bp, Unknown
  gut microbiota DNA sequence
catctaagcgtgaagcccccctcaagatgagatatctcatacgcaagtagtaagaccccttgaagacgacgaggtagataggtcagaggtggaagtgcggtaacgcatggagctgactgatactaatcggtcgagggcttgaccaataaggtctgagagagcggcggaaggattacagaggagaccgttgaaagtttactttcataaggtcggatctggaagacttcaggcattggcgaagccaatgacatgaggaaaatcgaagatttttcgaatgaccgccgcggagttggataacaaaggttgtaaagtattcggaagatcaacagttcaatatgtggttttgaaggtatgtatagatgtaagggaaccgtcggtttgtgtctgatggttcccttttttgtctttaagcataccaagtatatcggaccatgcgcctgtatactggaaatgctgtcctctgttaagccgcagagaaggggtgtttcaaagagaaaaatacctgatgtacattctcctgtgccaggtaagattggaggaaaaatggagaagaaaaagtttcagatgccccatacttatatcatcatttttggggttatcctggtagctgcattgctgacctgtttcattccgttaggaaagtatgatacaaaagagatcacctatacggttaatggatcagaaaaaacaagaaccgttgttgatccggacagtttccagtatattctggatgaaaacggcaacaaggtgacccaggctgcaccgatctttggtactgaagattttggcggccgcggcggtatcgtcaactatgtatttgaaggtatgactgcaggaagcaggggcggcggagccgtagccattatcgcatttaccctggtagtgggcggtgcttttggtatcgttctcagaaccggtgctgttgaaggtggtatcatgcgtgttatcagcctgacaaatggtaaagagatcatcctgatcccgatcctgatcacactgttctccttaggcggtgctgtatttggaatgggcgaagaggcgatcccatttgttatgatcctggttcctatgttcattgctatgggatatgatgcagttgtaggtatcatgtgcagttacgtggcaacccagatcggtttcggtagctcctggcagaacccatttggtctggcagttgcacagggcgttgcaggtatccctgttatgtcaggtgcatggttccgtattccgttatggatcttctttaccggtttaaccattgtatttaccatgcgctatgcagtaaaggttaaaaagaatccgaccatgtctgttgcatatgaatctgaccgtgaatacagagaagattttaaaaataatgaaaacgaagaaaagccatttactttaggtcacaaactggttcttttagatatccttgtatgtatgatctggactgtttggggcgttgtaaaagatggatactatattcctgagattgcttcccagttctttgtaatgggtctggttgccggtgtgatcggactgatcttccgtctgaatgatatgcacttaaatgatatcccggcagcattcaatcagggtgcagctgatctgttaggtgcagcaatgtgcgtaggtatggcacagggtatcatcattatcttaggtggaaccgatgcttcctccggaactgtattaaacaccattctccacagccttagcggtgcaatgcagaacttcccgccagtagtttccgcatggcttatgtacgtattccagtccgtattcaacttcttcgttgtatccggttccggacaggcagcacttaccatgccgatcatggcacctttggcggatctggtaggcgtagagcgtcaggtagctgttcttgcattccagcttggtgatgcatttacaaactttatcgtacctacttccggctgtctgttaggcgcattggctgcagcaaaactggagtgggggagttgggcaaagttccagatcaagttccaggcagtcctggttgtatttgcttccctggcagtggtccttggcgttgtcatcggactgtcataatgttacagttcaactgtaacgtcataattgccataacaaaagcttaacttgcttatccattttactgagattataatattccttaaacgtccgcaaaaggcggaaacgtgaaaggagtgcagcaaaatggagttgatgatcattattgttcaggaacaggattatccaaagctttcaagtacttttatccacaatcgtgtgatggcaacgaagtttagtacagagggactgtatctgaataagaaaaatatcacattgatggtatgcattgaaaaagagcgggaagaggagatcctggattatatccgccagagctgtacagaacgaatggaagaacgtcaggtttgcgaatataatggaatgactatggtagatgttaccaaaggcgtaaaggtaggcggcgccattgtatttttcctggatgttgaccggatgatgaagtattaaattataaatagtgaaagagagatccaccttgcgaggctgttgcagggtggatttttttggcccgcttgtttttctcctgcactcattatataatgttaccaaaaggttgtaaaaacaacgaaaagcgaaagactgcgaggaaaagacacatggaagaagcattaagttgtattgggaagatgcctatatttagtgggatcagggaagaagagctgtatacactgatcaaatgctgtgacggacagatggcagtatttgaaaaagaccagtggatctttcaggcaggagaagaactgggatatatcatggttgttttaaagggacgcctggcgatcattcaggaagatttctggcatcagcaaaaagagacgatccatattatgccgggagagatatttggtgaaaattacgccagcgcaggcagtaaaatattgcctgtaggtattaaagcagcagaaaacagcgaagtcctgtttttagattatgaatgttcccttactttctgcacgatggcatgcccgtttcacagcatgatggtccataatctgatcaggatcatgagtgcaaacaaaggccgtgcagaagaaaaattggaacatatatcccagaagactaccagggataaactgcgttcctatttatcacgcaaagctttacaggaaggcagctacagctttgatataccctataaccgtcaggaactggctgactatttaggcgtagaccgcagcgccatgtccagtgaactgggaaaaatgaaagcagaagggatcctggaatttaagaaaaatcattttatattaaataaattaaaataagatcgatgcataaaaataccccggagcgattggatcattcagatctcgctccggggtattgattttcatattcagatcaattcagaccaactgtatggcatttgcctgacagtaaaattacttctgattattctctttcttcagctcagctaacttcatagcgcgaacctttaatggaagtccgaacagagtgatgaagccgtctgcatcgtggtggtcgtaaaggtcaccggttgtgaaggatgctaaggactcgctgtataaggagtatggagaagtggttccggctttgatgatgttgcccttgtaaagtttgaacttaacttcaccggttacatattcctgggtggactctacgaatgcctttacagcgtcgcaaagaggagtaaaccattttccttcgtaaacgatctgagccagcttattgcccatatccttcttaacttccatagtagcacggtcaagaaccagctcttccagctgtctgtgagctgccattaagatagttccgcctggagtctcataaacgccacgggatttcatacctactacacggttctcaacgatatctacaataccgataccatgctttccgcccagctcatttaacttgcggataatatcagaaactttcatcttaacgccgtttacgctggtaggaacacctttttcaaaggtcatagtaacatattcatcctcatctggtgcctgttccggggtgacacccataaccagcatgttggagaagtttggctctaaggaaggatcttccagttccagaccttcgtggcttacatgccagatgttgctgtcacggctgtagctgtggctgtggtcaaatggaaggtcaatgccatgctgcttgcagtattcgatctcatcctcacgggactgcatggtccatacgtcagtcatacgccatggagcgatgatcttgatgtccggagccagtgccttgatagacagctcaaaacggatctggtcatttcccttaccggtagcaccgtggcagatggcaacagcgccttctttacgtgcgatatcaaccagtctctttgcgattgcaggacgagccatggaagtacctaataagtattcattttcgtaaactgcatttgcctttacacatggcataatgtagttgtcgcagaaatcatctactaaatcttcaatatataatttagaagcgccggacagctttgctctttcttccagtccctctaattcttttccctgtccacagtcgatacagcagcaaacaacatcatagttgaaatgctcctttaaccacggaatgatagcggtggtatccagaccgcctgaatatgctaaaactactttctctttcatcagtacatcctcctgaaaattgctttgatatttgttttgatcatgttttaatcactaagctttcataaatatacaacataatacaggaaaatgcaagccttaaaatagaaatttcaaaaaagtattgcatattatgcattgcagatgtataattatgaaatcttatacagagaaaaaataaaaaaccttatgaaaacacacttttcaattaaggaaaaagtaactataataaggtaacaggctttagcactgtagtaggttgcagtttataaaaatgactaaataatgaaaatatatacagaggagagtaaggatatgataaaagcaggtattatcggatctacaggttatgcaggcggggaactggcaaggctgctgctgcagagagatgacgtagagatcaaatggtatggttccagaagttatatcgatcagaaatatgcttccatttaccagaacatgttcaagatcgtagatgataaatgtatggatgataatatgaaggaactggctgaccaggtagatgtaatcttcactgcaacgcctcagggcctttgctccacattagtaaacgaagagattctttctaaagtaaagatcatcgacttaagcgctgacttccgtattaaagatgtagcagtttatgaaaaatggtacaagctgacccacggatcaccagaatatattaaggaagctgtatacggacttccggaagtaaacagagaaaagatcaagaatgcaaggatcattgcaaatccgggatgtttcccaacctgttccttcttatctacttatcctttagtaaaagaaggtctcattgatccaaacaccattatcattgatgcaaaatccggtacctccggcgcaggcagaagcgcgaaagtagacagccttttctgcgaggtcaatgaaaatatcaaggcatatggcgtagcttcccacagacatacaccggagatcgaagagcagctgtcctatgcagcaggaaagccggttgtgatcagcttcacccctcatctggttccaatgaacagaggcatcctggtaactgcttatgcttcccttacaaaagaagtgacctgggaagaggtaagagccgcttacgacaagtattataaggatgaatattttgtacgtgttctggacaaggacgtagttcctcagacacgctgggtagaaggaagcaactttgcagatgtaaacttcaagatcgacccaagaaccaaccgcatcgttatgatgggcgcaattgacaatatggtaaaaggtgctgcaggacaggccatccagaacatgaacttactgttcggtcttccagagaatacaggattaaagcagatcccgatgttcccataagataagcagccggaaaggaataaaaatggcagggacaatggatatcctggttcgggaaatgaccatggaagattacgatcaggtatataaattatggacgaagatatcaggcttccgtatccggagcattgatgattcaagagaaggggtggaacgcttcttaaagcgaaatccgaccaccagcgtagtggcagtccagaacgggcatatcgttggaaatatcctctgcggacatgacggacgtaccggctgtttctatcatgtatgtgtggaagacggctaccgtcatcatggaattggctacaaaatggtacgtgcagccatcaaggccatgcagaaagagggagtgagcaagatctccctggtggcctttaaagacaaccacattggaaatgcgttctggcagggcatcggctggacagagcgtgaagattttaacagttatgagtttattttaaatgaagaaaatataattcggtttgtgaagtaaagtggcgcagagaaaaacaaacagttgcgaagcagaaaagagggaataatattatgaacgaaaagataaaaatgatcgaaggcggcgttaccgcagccaaaggctttatggcagcatctacagcagcaggcattaaatacaaaaaccgtcaggatatggcgatgatctacagtaaagaaccttgtaaaagtgcaggaacctttaccaccaacctggtaaaagcagctcctgtaaaatgggacaagaaccaggtgacaagcggcgctgacgcacaggcagtgatcattaacgcaggtattgcaaatgcatgtaccggtgaagaaggaatgggctactgcgcacagacggcaaaggctgcagcagaaaccttaggcgtggcagaagacggcgttttagttgcttctaccggtgtcatcggtatgcagcttccaatcgacaagatcgcagcaggtgtaaaggctatggtgccactgcttggtgacagcctggagaaaggcaccgaggcttccaaggctattatgactaccgatacaaagaacaagcaggtagcagtacagatcgacatgaacggaaccaccgttactattggcggtatgtgcaaaggttccggcatgatccatccaaatatgtgtaccatgttaagctttgttactacggacgcagccatcagcaaagaactgcttcaggaagcattaagcgaagacattaaagatacctacaatatgatttctgtagatggtgatacttccaccaatgataccgttctccttctggcaaatggccttgcaggaaacaaggaaattacagagaaaaatgaagattacgcattattctgcgaagcattaaactacatcaacgaaactctggctaagaaaatggccggtgacggagaaggctgcaccgctttatttgaagtaaagatcgtaggcgcagaaacgaaggatcaggcgaaagttttagcaaaatctgttatcacatccagcctgacaaaggcagctattttcggacatgacgcaaactggggccgtatcctttgcgcaatgggctactcaggggcacagtttgatccggaaaaggtagatctgttctttgaaagcgcagctggacatatgcagatcatcaaagacggcgttgcagtggactacagcgaagaagaggcaaccaagatcctttctgagccggaagttaccgccattgcagacattaaaatgggtgatgcccaggcaactgcatggggctgcgacctgacctttgattatgtaaagatcaatgcagattaccgttcataaacagttttgatataaaaaacacaataaaaaagcatcccgaaatgtaccccatgaacatttggacgtacacaaaacatacaggaggaaccaaacatgaaccttgaaccaatgcaaaaagcagcggtgctcattgaggcactgccatacatacagcgttttaaccgaaagatcgtcgttgtaaaatacggcggcagcgccatggtagacgaagaattaaagaaaaaagtcatccaggacgtagtactgttgaaattagtaggatttaaaccgatcatcgtacacggcggcggcaaggagatcagccgctgggttggaaaagtaggcatggagccacattttgtcaatggtcttcgtgtaaccgatgagccaaccatggaaattgcagaaatggtattaaataaagtcaataagagcctggtacagctggtaaatgagctgggcatcaaggcagtaggcatcagcggcaaagacggcatgatgttaaaatgccacaagaagctttccaagggaggagatatcggctttgtaggggaagtagatgaggtagatcctcaggtcatctatgatctgttagagaaagatttccttccgatcatctgcccaattggatatgacgagaatttcttaagctataacattaacgcagatgatgcagcctgtgccattgcaagagctgtaaaagcagaaaagctggctttcttaacagacgtagaaggtgtatacaaggattttgaggacaagagttcccttatctctgaaatgaccgtagaagaggctcaggcctttgtagacagcggaagcttaggcggcggcatgcttccaaagctgcagaactgtattgatgccattgaaaatggtgtttccagagtacatatcttagacggacgtattccacactgcctgcttctggagatctttacagataaaggtattggtactgctatttataattcaaaggaagatgtgaggtattatcatggctgatgagaaaatgatcgatcgggcagaacatgtcctgtataaaacatataaccggtttcctgtagtatttgaccatggaaaaggcataaccttgtgggatacagaaggaaatgaatacctggattttggtgcaggtattgcagttatgggactgggatactgtgatgaagagtatacaaatgcagtaaaggcccagatggataagctgacccatatctccaatctgttttataaccagccttctatcagtgcgggcgaaaagctgttaaaggtatccggaatggataaggtattctttaccaacagcggtacagaggctattgaaggcgcattaaagatcgcaaagagatatcattataataaacttcatgagacaatgggagacggctgcgatggctgtgaggaaaaagaagtggacatgactggtgagatcattgccatgaaccattccttccacggaagaagtataggtgctttgtctgtaactggaaatgcacattacagaactccgtttaatccactgcttccaggtgtacgttttgccaactttaatgatctggacagcgtaaaggcacagattacagacaagacctgcgctatcattatggagactatccagggcgaaggcggaatttatcctgcaacagaagaattcttaaagggcgtgcgcgctctctgcgatgaacatgatctgctgcttattttagatgagatccagtgtggtatgggacgttccggagaaatgtttgcatggcagaaatacggcgtaaaaccagatgtaatgaccgttgcaaaggctttgggaaatggtgttccgatcggtgcattcttagcctgcggtaaggcagctactgctatggtcccaggtgaccatggaactacctatggcggaaatccactggtaacagctgcagcagacgcagttttagatatctttgaaaaacgccacattgcagaccatgtaaaggaagttggcgcttatctgtatgaaaagctggaaggcttaaaggataagtatgatgtggtaaaagaccaccgtggtgttggcctgatccagggtctggaatttacagttcctgtaggtccgatcgtgtccaaggcattattagagcagaagctggtgctcatcagtgcaggcgccaatattatccgtttcgttccgccgctgatcattgaaaagagcgatgtagacgaaatggttaagagactggaagttgtgatcaaagaaatgtagtgaaaaagttctcataacgaacgcaaagagtccggtagttgagaaaaagtggcaaaaatgcacgaataatgaactacatagttcagaaaatacgacaaaataacaaaaaatacagttttttcccctcctgatttctggtagacttaagtcaacagaaaagacaggagggtttttattatgaagaaaaaacttgcattgttactggcttgtaccatggcgttaggcctgacagcatgtggcggttccaaacctgcagcagctccggagacaactgcagcagcaaccgaagcagccgcagaaagcagcgaagagagcaaagctgatgagaagacagaagcagccggcggggatatggatgctctgatcgaagcagctaaggctgagggcgaattaactgtatatggttcctgcgaagaggaatacttatcagcagcctgccagaactttgaaaaactctacggaattaagacaaaataccagagactttctacttcagaagtttacaccaaggtttctgaagaagctggaaagccttcagcagatgtatggttcggcggaaccatggatccttacaacgaagcagttgcagctggtctgctggaaccatatgacgcgatcaacgctgtaaacctgatcggtgatgagtacaaagatcctaccaactgctggtatggtatctacaaaggcatcctgggcttcatggtcaatacagaagagctggagcgtttaggtctggaagcacctaagacatgggatgatctgaccaaggaagagtacaagggcctgatcatgatgtccaacccgaataccgctggtactgctaaactgatcatcaacaccatgatccagatgaagggccatgacgaagctatggaatacttcaaggctctggacaagaacattgcccagtacaccaagtccggttccggtccttccaagatggttggccctggcgagtgtgtaatcgctattggtttcttacatgatggtatttatcagatccttcagggatatgacaacatccagctgatcgttccagaagacggaacatccttcgaagttggtgcaaccgctatcttaaagggcgcttctcatccaaatgcagcaaaactgtggatcgagtatgcattatctcctgactgtgtagaccatgcaaaagagaatggttcttatcagttcctggtattaaagaacgcaactcagccagaagaagctgaaaagttcggtctggatatgaccaataccattgactatgactttgaagatgcaaaagagaacagtgctaagtatgtagaagacttcttcgaagcattaggaagcacatctgaaggcgctgactccagccgtttcttaactgagtaatcagaataatagacggactgcaaaaagtcattcttaaaaagaaagtaaagcttatataaagtaagctaagcagaaaatgctgcgtaatggaataaacattgcgcagcattttcaaatcaaagacagaattggttgtaaaattcatagtaaattataaaagggggtctcgcaatggccggaaaacaaagtgcacagctggaacggaagaaattttttgctgacccgatcatggtctcaatgattgttgtccttctggtttttttggcgctgtttattctgtatccgctgttaatgctgttagtagacagcttttatgcagagggaaccattacactggatgtatttaagcgtgttttaaatctggaacgtttccgcaatgcgtttaaaaacacactgacacttggatttatcgtaggttttgcttctacagccattggtttattatttgcttatgtagaagtatatgttaaattgaaaacaaagatactggaaaagttatttggtctggtatcgatgcttcctgttgtatctccgccattcgtactgtctctgtccatgatcatgctgttcggacgaagcggtatcatcacccgttcccttttaggtatctacgactctaatatttacggactgttaggtatctccgttgttcagacacttacattcttccctgtatgctatctgatgttaaagggactgttaaagaacattgacccgtcactggaagaagcgaccagagatatgggagctacccgttggaaagtattcacaagcgtaactttcccgcttctgcttccaggtcttggaaatgcattcctggtaacctttattgagtctgtagcagactttgccaacccaatgctgatcggtggttcctacgatactctggcaactaccatttatctgcaggtaacaggtgcttacgactccaccggtgcagcagccatgtctgtggtcctgctttcactgactgttattctgttcctgatccagaaatattacctggagaagaaaacagccgctactcttactggtaaagcttcccgtatgagaatgcttatcgaagataagagcgtaaccgttccgctgactattttctgcggcgtggtagcagctttcgtacttttgatgtacatcatggttcctttcggcgcactgtttaccctttggggcagagattacagcttaagccttaaatggttccagtacatgtttaagaccagcggactgaaggcatttaaagactcctttgtactgtccctgatcgcagctcctcttactgcattcttatccatggtcatttcctatctggttgttaagaagcgctttaaaggaagaaacttcattgaattcgtatctatgttagcaatggctgtacctggtacggttcttggtatcggatatatccgtggttatgcaaatggtctgttccgaagtggctttatgagcggcctttatggaaccggcgctatcctgatcattgtatttatcgttcgaagccttcctaccggtacacgaagcggtatctccgctctgcgccagatcgataaatccattgaagagtctgcctacgacatgggtgcaaactcagcaagagtatttatgactgttacattaccccttattaaggattccttcttcagcggcctggtaactgcgtttgtccgcagtattaccgctatttcagccatcatcctgttagtaactcctgacttcctgctgatcacttgtcagatcaacgagcaggcagaaaaaggaaactacggtgttgcctgcgcttatgcaaccgtactgatcatcattacctacggtgcagtgctgatcatgaacacgctgatgaaattcttcggagtcagcagaaaaatcaaaacggaggaataggttatggaaaagcagaaaaaaggtgttcgtctggaacatatttccaaaatatataatgatcctaaaacaggaaaagagttttatgcagtccaggataccacactggatattgaaccaggtacatttgttaccttactgggaccttccggctgcggaaaaacgactacactgcgtatgatcgcaggttttgaaagcccggatgaaggcgagatctacttaggtgatgaggccatcaacagcctgacaccaaataaacgtgatactgcaatggtattccagagctacgctctgctgccacattacaatgtatttgacaacgtagcttatggcttaaagattcgcaaggtgccaaaggaagagatcagagagagagttttaaacatcctgaaactggtagaaatggacggaatggagtcacgtatgaccaaccagctttccggtggacagcagcagcgagttgctctggcccgcgccctggtcatcgaaccaagtgtcctgctttttgatgagcctttaagtaacctggatgcaaagctgcgtgtgaccatgcgtactgagatccgtaagatccagcagaaggtgggaattactgctatctatgtaacacatgaccagtcagaggcaatgagtatttctgataagatcattatcatgagcaagggtaaagtagagcagattggtactccaagagagatctactatcatccaaagagccgtttcgtagcagactttattggtgaagccaacttcttaaaggcaaaagttaagtctgtgaatggagaaaaggctgtgatcgatgtaatcggtgaagagatcgaagtcaacaactatggtgagaaggctgccggtgaggaagcaagcctggttctccgtccggaagcagttgttctttctgaaaaaggacttctggaaggaactgttacactgtcaaccttcatgggttcctatcagtattaccaggtaatggtaggtgatatggagatccagatcacagactacaatcctgtaaaccgccggatctatgaagtaggcgagaaggcatatctggactttgatcctcatggagtttatatcctgtaaaatcagttattaaatgactttaaaagcgtatcctgagaaaatataaactttggatacgcttttttattgccaccccttattgctatatatctaaaaacatgataaacctgatatatattttctgaaatctgataaatattaaaacagatggtttttctgtataataagaactatcaaagaaatcagaaatattaataaatgtcctctcgaagtctttactgcacctgcctttgtggccgattttccgccagtcgcacccgaatttcatcaatgtacgcaccgcgtacgcctcagaaatttgggcacaactgacaaaaaatcttttcacaaaatcagacacagaaagattctgagagaacatagtaagaaggaggaaataaagtatgttgaaaaagtcattggcaatagggctgagcgtggttatggcggcagaggtacttaccggttgttccggcggctctggcacaacagagaccaaggcagctgatactggaaaaacagaagcagcagcaagcgaggcagcaacagaaggcggttcaggagaagaaaagactcttactgtgttccactatatgggacagtccgtgaaacagcagggtcttgaaaaactggaagaagaatttaagaaaacacatccaaacattacctttgaaaatatcttctataatcagggaaccgattacttcccacagttatccacagctttggcatctggagaacagcctgatattatcatgggtaacccggctacctatccggatctgatcgaaaacggatatgcaatggatctgacggataatgatgtgatcaagaatttaaatgtttccccggaagatctaaatgatgcttccgcaaacggaaaagtatatgcagtacctattgactttaaggcatccggctttttctacaatgtaaagatgtttaaggaaaatggtttggaagttccaaagacccttacagaatttgaccagttagttgaaacattacacagcaaaggcattgatccatttatcgacctgtacggagaaggttctaccggtgatattgaaacaagaggtatcattgttccaagagctgtagctgccggtgatctggatctgtatgagaagctgatgagcggtgaaaagaagctgacggattacgattacatggatgaagcattaagcgtatgggataagagaatgacttatccacgtatggatgcaatggcaaacaaccaggataaagctctggagctgtttgtgaccggacagggggcaatgatctttaccggaaactggaatattggtgaaatgcttgctaaatccgaaggaactgattttgaatttgatttcttcctgcctccgatcgacgatgaaggaagcgcaaagctgtgtacaatggtagaccagtcctttatggtgaatccaaattctgattgtgcagaagaggctgttgaatttttagagtattgggtaacagatggtgctttaacgtggtctgaaacaaccatgatgcctctgatcaccggtgagtcttctgataagcttcttccggtggttaaatccatggcagaattgaaggcaaacagctctatttcccagggaatctttacaaaaccatttaacacagaatttgtaaatgcatggagaaaaggacttatctcttatgcagagagcgtatgcacaggcaagccgatgactcacgaagagtgtctgaacaatattcagtccctgtttgatgatattatcgcaacaagcaaataagtaaaataagcagaaaataataagtgtagatgctaaacaggggctgctgcaggatcttaggagatcgtattgcagcggcctctgttcagaagaaaggaaatcttacatggataaaatagagagagtgacaagggcatttaaaggggaagaggtggatcacattccggtgtgtttgtggaaacacattccgcctactttatggaaagatgagttgtttatcaaggcgcagatggatttttacaaggaaacagatgttgattttatcaaactttccgcagataaatatttctgctggccggcacctgtgttaaaagatatccagtctgcaaaacagctttatgatataaagccgttgggagcccatcatccacacatcagaggccagatcaaccgtacaaagaagatcatggaagagatcaatggtgagtgcctggcattttatctgatcttctgcccgttatcttatttacgtctggagatcggatatccgaaaatgatgcagtttatggaagaagatccggaagctgtattatatgcggaaaatgtgatcgcccaggatgtaaaggtccttgtaaaagggatcatagaagaggcaaaggttgcaggtatcttctacagcgtacagaatgcagaagaaaaccgctttacatatgagacatacagaaaatacatcactccgccggagaaagaagttttagattatgccaatacattaagtgatatgaacgtgctccactgctgtggatgggaaggtattccaaaccgcttagaggactgggcggactataagacagcagtagtaagctgggcaagatatattgaaggtctggatgtaaaagaagcaaaagaaaaattcggacggactgtatggggcggctttgacaaccggccgggaagtctgatctacacaggaacaaaagaagaaatcgaggcagaagtaaaacgtctggttgaggcaagcagcaagagaggctatattatcggaccggactgcagcatccatgatgaacttccggaagaacgcattaaatggatcgtagacgcagcaagaaagctctgataagttcttaaaaagtatagatataaaaaggagaattttatgtattacgttgatgaatataaggcagacagaaaaagatatgagaccatgcagtacaatcgctgcggaaaaagcggactgaaacttccggcagtgtcgttgggactgtggcacaatttcggttccaaagataattatgacatgatgaagaccctttgctttaccgcttttgataacggcatcactcattttgatctggcaaataactatggcccgatctacggatctgcagaggaaaactttggacggatcatgcgtgattttttacgtccatacagaaatgaactgatcatcagtacaaaagccggatatgacatgtgggatggcccttatggaaactggggatccagaaaatatcttattgccagcctggatgagtctttaaagagaatgcagttagattatgtggatattttctatcatcacaggatggacccggagacaccattagaggaaacgatcctggctttagatcagatcgtccgctccggaaaagcattgtatgcaggaatttccaattatgacggggaacatgcaaagaaggcattagagattgcaaaagagatccacctgccgctgatcatcaatcagaaccgttacaacatttttgatcgtacagtggagaaaaatggcttaaaagattatgcacgtgagtcaggaatgggtctgatctgctttagtcctctggcacagggaatgttatcagaaaaatacattaacggtatcccagctgacagccgtgtggcaagagacggaagatttctccatgcatcagacattactccggaaaagatcgaaaagattaagaagctggatgctcttgcaaaagaaagaggacagagccttccacagatggcactttcctggctgttaaaagacagtgatgttaccagtgtacttatcggtgcgtctaagccggagcagatattaagtaatattggaattgtgggacatacaacatttacaaaagaagaactggatctgatcgaccagatctccaaagagcagtaagtgatcaagcaggaataaaaagagaggcggggaaaagataatgaaacagaaaagatcggtgaagaagttgcgaactcatgcagggaatttcttatttctttttcccgccatgttgttgtactgttttgtagtgctcgttccatttatacagggtattccttattcatttacaaaccgtgccagtgtagtgagccagagttatgattttgtaggtctgagaaactacatggaactgatcacaaacaagtatttccagcaggcgttttttcataccgtccagtttaccgttatctatgtgatcggggccaatgtgctgggactggcattagcactgatgctatcaagatcttccaggtttaataacctggcaaggaccattatgtttattccatttacagtagcccttaccagtggtgctatcgtatggagttatgtatttacagatgtatattctcctctgtttcagaaaatgagtcctttgggactttcttcccaggtagttccggctatggccattatcgccatctggagagatatgggttactgcatgctgatctatctggctgggcttcagtctatttccggagaatattatgaggcagcaaaagtagacggcgctacctggtggcagagaacaagactgatcaccttccccctgatccttccggcgattgtttctaatgtgacactgctgatcgcctggggccttaaatgctttgattatccaatggcagtagcaagaaatatggaggcagcacagactgtatccatgtatgtatatgattacatatttggctttaacaaggcaggcattggtcaggcagcagcgatcatcataaccgtagtgctggtggtcattacccagtgcattacatccataggagctaaactggaggtggatcaataatgggaactacgaaaaaaagacatttattgtctgtaatacagaaagttctgatcacatgcgtcatgctggtcgtgatctcacctttttatatcagtatcgtatatgcgctgaaaaataaaaatgaccttacgatcaaccgcctggcatggccgacacatcctaccttgatgaatttccagcgtgtgatcacggaaaatgaccagttccttacaggatataaaaacagtatcctgactacggtgccggtagtggtccttctgatgctgatcacatccatggcagcttatgtgctggcacgatatacgaccaggatatataaatggatctatcttatttttatatccggtatgctgatcccgatccagtgtatcatgcttccattttatattaactttttcaaactgaaccttacaaactccaatttaggctttgtgatcgcaaggaccggactgcagatccctatcagcatcctggtagtgaccggttttgtgaaggcgatccccttagatctggaagagtcagcaaggatcgatggatgtaaccgttttaaaatgttctggaaagttgttttcccgttaatgaagccggtaaatgcaacccagctggtattaaacacactgtttgtatggaatgattatacaacagccatcatccttttaagaaagccgtttgccagaacactgatccttgcccagatggcttactttaatgaatatacttccgatctgaaccttgcatttgccttttttatcctggcgacattaccgatcctgatcgtatatttcagtatgcagaagtatgtggtaggtggtataatgatgggagcagtaaaagggtgatgacaggataaagggagaaaatatggcctataaagcagttttgatcgacgataataaaaatacggttctttcccttgaatattcccttgaatgggaaaatttggggatcgaacttgcgggaactgcttatgatggaagaagcggtaaagagctgatcgagaaaacggatccggatattatcatcagtgatattaatatgccatatctggatggatttaccatggtggaggagtccggtaaggcagaagacaggatcataatcgtgatcacgggatatgataaattccagtatgcatcccgcgccattaaactggctgtatttgattatattttaaaacccattgatgatgaggaattaaatgacagtttgaagcgggctgtgcgtaagctggataaaaagcacagcctggaaaaccagaagatcaatacagtaaaggcaatgatgacagtagccatcacaaaccaccgggatgatacggtgggcaatatcacagaaagtgaaaaggaaccagtaaaaaggggcttggtgatgatcggcgctctgaaaggagagccatccaaggcccttttggagcgtgttgaaacactgactttattatcttccggaaatgcttattccattgtaacagaagaacggatcatcctgttagtcacggaaaaaagggaaaacagtggctggcaggcagaaatagaaaaattaaaagagaagttaaccacgttggaggaactgtctgcccttggtatcagcagtgagaaagaggagacagcttccttctattcgttatatttagaggcatatgaggatcttctgaagaaaagtaaaaaagaaaatcatatgcaggtctctgatctgcaggaaaatgccctccgccttgcagacagtataaaaggaatggaagattatgaacggatcatcgaagaattccttatgtgtacctcaggaagctatgttgccatacagatcatggctcttttcttttgcggccgtattatggaggaacacaagacctggagaggggaattggatcatctgtcctttgaggtggcaggtattacctcacagaaaatgtttgccagctggttaaagacgtttctggcaaagattgacgagatccgggaaaaaagcagcggaaagtcagaactggtactgctggcagtaagatatataaaaaatcactgtctggaaagcctgaggctggaaactgtggcggaagaactggcagtcagccccaattatctttctacgatcataaagaaagaaacggggatcacattccagcagcatatgatccaggaaaagttaaatatagcaagaaaacttttagatgataccagaatgaccattgatgaaatatccatagcagtgggatatgaaaactatatcagtttttataatgctttccgcaaaaatgtgcatatgacacccagtgaatacagaatgaaaaaaggaaattgtcaatgaaccagttaaaaagatatgaagacctgccgtttcagaaaaaactgttttttgtatttgggttcagtttggtattttgtattgtagtagctgtgtttgtgcttacggattactgtaccaggatcctggtgcgcaataatattgataatcttaccgtgatcagccagcaggccgggatcgattttaaccggcgggtgtctgatacagaaaaacagctgtttaataatattaccatgtttcagatcccggacagtatagcagcctgtgatgcagataaaagtgattataaaaagagagaactgaaataccgtttaaaccagatcgttgcggaaaatacatattttgattatgcctgtctggttacagatggtggctatacctgtgataccattgagaagataggaaaaaacaaaggcgagatacgtacattttcccaggatgctttggagaattataaaaaaaataccatgaaaaacgggtatgtatggatctcagatgaagataaccgtatttatctgatgcacagtgtcaggcagagaagtacattaaaacatgaaggatatctgatcgtgcggatcaaggaccgggcttttaaactggcagaagtcttaagtcaggggatcggacttgtattttacgacagggaccaaaactgcgtccatgtggagacaaacagtgaagaactggcagacaagatccgggaagatgggctggaaaacgggtatcagaagatagccggacaatcctattatattgtagaaaacagtataaaaaacagtgaatggagtgtgatcggtattacgcccatcagcagcatttatcatatgcgcctgaaagtacagatcgttgcggcagttcttacagtagtcactttaatttgtggctgtatattaatgcagtatcttaccagaaaagtaagccgacagatcaatgccctttcagataccatccagaatgcggcaaaaggtgagatcggcatccaggcaccggtctatatgaatgatgacattggaaaaatagccagacgttttaatgaaatgtccctgcagaataagaagctgatcgaagagctggtgcaggcagaggcacagaaaaacagcgcaaaaatggaggcagtggattacaagtaccgtttcctccatacacagattaatccccattttatctataacagtctggagactatcaatgccattgcaaaggtgaaccatacaccggaagtcagccgcattgtacagctcattggaaaatatttccgcaatatcacaaaatattcagatcatcagtttattgccctggaaaaagaatttgaactgctgcagtgttttattgatatttataaaaatatcagaggcagcaatattgagatccgtctggactatccccaggaactgaaaagtgtggagataccaactatgctgctgcagccaatcgtggaaaacagcttcgtccacggtatgcggggaatggacgaattgtttattgtctgcctgtctgcaaaggggatcagggatgaacagggaaaactttcagaaatgatcctgtcagtggaagataatgggatcggaatggatgaagaggcagtagaaaggctgacaaaaggaaaacggacagagccggatgaaaaggaccggaagaaagtatttcgcaatatcggagttccaaatatcatagaacgtctgaaaatgctttatggagaccgggcgaaacttaccgttacaagcggagaaaatggaacgaccatccagatccggctgccggcagacggtgagaagaaagagatcatttgaataggatgaaagagggggatagggaatgtttaaaaaaggtcacaaaaataaaaaaatacatttattacgtctggcagtgatggcagcttccctatccgtttgcctttttggatgcagtgggttacatgctgtgaaaaaccggggaagaagcgctgaaatggatacagacagcctggttgtatacagccctcatcctttggattttattaacccgatcgtatctgaatttgagtcccagacaggaattcctgtacaggtgcgtaccgggggaaccggagaacttttaaagtgggtgaaagaaggggacgagccggtatgtgatgtgttctggggcggttctctatatacagcgggagcaggaaaagacatatttgagccttatatcagtgaaaatgaagaatatgtccgggaggaatttaaaaacaaagagggaaatatgacccgttttacagacatccccagtgtgcttatggtcaataccaatcttcttggaggtatgaagatccagggatatgaagacctgttagatgaacggttaaagggaaagatcgccatgtgcgacccgtccacttcttcatctgccagtgagcatctgatcaacatgctttatgctatgggagatggtgatccggaaaaaggctgggattatgtaagaaagttttgtgaaaatctggatggtgtgcttttaaaaagttcctcagaagtttatcagggagtggcagagggacgatacgcagcaggtcttacctttgaagaaggcggtgccggttatgtgtcaaagggcgcgcctgtaaagctggtttacatgaaagagggagttatttctactccggatgtggtatgtatcgtaaaaggaagcaaacataaaaaagaggcagaagaatatgtggattttgttacaggaaaagctgcccagactgtgatcgcagacagcctggaccgccgctctgtgcgaaaggatgtagaagcagctgcctatcttccggataaagaggagattcatatgatcacagcggatgaagcactggtcaatgaaaagaaggagcagtggcagaacaggtttgtagatattttcagggaggtgtccgggaaatgaaacgggaacgttattttcgggatgaattatggcggatgtttgccatttatgccatccttccagcagtgctgtttacatttttctgcgggattctttttatggcagttctgcttcatgggagagaacgggccaaccgggactatctggcttatgtgactggacgggtaaaacagacagtggaaagctgtgaacaggggattgaaacgctggcagaacttcctcaggcagtatcgggcccaggttatgtactggagcgaaaccgcattttccagatcttttatgggatctctgaacaggcgggatatgaaccggaactgtatttagtagaccagagaggaaggctgcttttatcgaataaagagaaactgccctcttatcttaacaagagacaggaagtagagtggggaatttatgcagctatggatgccagaccgggacaaacggccttccggctgatgaatggctgggacagcggggcaagtacagctgttttcgggcgctgggtaggttcagaagatggaaacggacgttatatcattcttgcagttccgggaagcgggcttttaaggacccttgcccggtcaggagaacaggtggcagtgacagaccgctatggctgggcgtatttttgcaataatggcctgttccttacagacagcaatcaggtacggccggcagtaaaagaagcaggagcttacatgcgcttggaccagaagacttattttacatcagaaaataacctggaaaacggccgttttcatatttatgttatgtccgatgtgcaaaatgtgcttacatctttggtctttgctggtatactggtagcagtggccctgcttttgatgactgcctgggtactgttccagtccaaacaggtgacagagcgaaagacggaagatctgtataaactgttagatggaatggaacttgccagacagggaaatctggaacggacaggagctattgaccgtgacaatgaatttaagatgatcgcggaagcctacaatgagaccattaccagcctgaaagagcagatggagaacaaccagaaaatgacagaacttctggctctggcccagacaaagcagctggaatcccagtttaatccccattttctctataatacactggaaaatatccggtatatgtgcaaactggaacctgcaactgcagaacgcatggtattttcattatccaagcttttgcgttacagcctggatggcagcagggagcaggttactttggaagaggacctgggacatttaaataattatctgtccattctggaaatgcgttttggaagcaggtttgaatataagatcgatattgcgccggagtgtatgcaatgtctgatcccaaagctggtgttgcagcctatgatcgaaaattctgtaaaatatggctttggcaatcagttaaatcttcatgtagagttaaaggcatacatccatgaggaaaaactgatgatgatctgccgggatgacggagtgggaatgagtgctgctatggttgaaaaactgtgtgctcttatgaaccagaaagaagcgccgggaagacattccggactttataatatacaccgcaggatccagcttctctatggatatccttatggtgtggaaatacgcagcctggaaggccatggaaccactttggtagtcacacttccggcagcagcagaaaaaaatgtgcattcagtacagggggataataacgatgcttcgggtaatgatagtggaagatgaggacatgatacgaaagggtcttgtatttaccatagactggctttccatggactgtgtggtagtggcagaggcttccaatggacaggaaggctatgaacggatcctggagtacaagccggatgtggtgatcgctgatatctgtatgccttttatggatggtattgaaatgatacagaaggcatcagaaaaagtaaagtttaaaagcatccttcttaccagctatgcagagtttgactatgccagaagggctattgaggcaagagtctgcgagtatctgttaaagccggtagatgaagaaaagctggcccagatcatgaaaaaactgggagaagagatcaccagcgtgcgtcaggtagaatatgccatggaacaagcagagttagaaggcggcaacctgaacctggaatattatatgaaactggaccgttcagaaaatggttatgtttcaaagctgttggaagccatccggacgcggtatggagagaagctgagtattgagtccatttccgaagaaatgggagtcagcgccagctatttaagccgtaagtttaaagagatcacaggacagaccttccttgatttcctgaacaaataccgggtacagcaggcgatcaccctgttaaacaccaaagaataccggatcagtgagatctcagaagcagtgggattttccgattataaacatttctgctctgtatttaagaaatataccttaaaatcacctacaaaatttgtaaagggaggctgacgtattcatcagtctccctgtttcttatctttgtctttatttttctttttgctcttctttttattctttttatcgcttttttccgttttgtcacttttatccggcttttcacttttggtgacttttttagaaggaaccgggctggtctgatccggctctgggtcaggcaaatgttctccgccatcgggtatgtaggtaacaatatcttcaatgcggcaggagagcagccggcacagggtatctaaagtctgggtggaaacggtctggttatttttcagacgtccgatctgtccggcactgaatttctcacgtttgatcagatgatactgggtaatgccccgctttttcattgtttcccataaacgttggtaagtgatcatggtaagcctcctattctttttcctgctcctgttcctttgttacagcagcttccaacagttcctgcgcctcttcggttgcattggaacttcccagttcttctaatttaaacttaagttcttcttccactgctgtccggatctcgtcttcctgttccggatccatatttggaagatcgcttaaggtgccaatgccgaagcggcgcataaattcttccgtagtggcgaagagcgccggacgtcccggtgcatccaaacggcctgcctcataaaccaggttgtattccaccagacggttgactgcgtggtccgatttgacgccgcggatcttctcaatctccagcttggtcacaggctgacggtaggcaatgatggaaagtgtctctaaaacaatatcagaaagcacctgctttttaggggcagaggcaatacggatcaggttggagtagtattttgactgggtacacatctggtagctgtcttctaactgtaagatttccatgccatgtttgccggtctgatagcgtttcatcagccgttccaccgctgcttttgctgtttctttatcctgtccgatggcagtagccagctgttttaattctacggcgctgcccatggtaaacaggacggcttcaataacggcttcctggtctttttcgttggttacaggtgtattgtctatggttaattcttccaatttatgtcctcctggggcagatatctgttgtgtggcagccggggattgcggcgctacacaaggtcgcttacctgctctaagtttaagtcttcttcctgaccttccggttctatggtctcaatgtccatttccccgaaagtttcttcctgggttaaatggatctttccaattttcattaattcaaggaccgctaaaaatgtaacgactacttccagtttatccgtctgtttctcaagaagctggcggaaactgaaacggcgggcttttcttgcataatccataacagaggtgatcttctgttccagactgaccggttcccggtgaatggtgccgaatttgcttcggatggggtctactttgtattctttgcgcttcattgcctgctcaaaaatacgctgtaattttgcaagggtaagaccatcaagcagttcatctaaatctgtaggcggccggtatttagctacttccggcggaagagaagatgccttgtaaaaatgaccggcagcgttttcctcacggtctgccagttcttctgccagtatcttatagcgtttatattctaacaggcgggctaccagctctgcacggggatccacttcttctccttcttcatccacctcttttggaaggagcatttttgctttaatatctaacagtgtggctgccataacaaggaattcgctgacgaggtttaagtcttcccgttccatgttacgcacatattccagatactgggcggtgatctctacaatgggaatatcgtagatatccactttgtttttctcaatcaaatgaaggagcaggtccagaggaccttcaaaatgctccagtttataggtaatggtttccattttataatatccttttcagggtgggctttgcacagcttccctcttttgggtgacagatgcggatcactaaaagctgtggccggttgtttaaacgtatgttgatggaatgggttccaagaccgcggcttactgccatgtaatgcccctgtttttcaaagatcccggcgcaccagggaaggaaaaactgatattgaggggtcataacaccgccaagtccgggaagccgtatggttcctccgtgaaaatggcctgacagggtaagatcagcgccccattttgcacaggcatcgaaatataaaggagagtgggctaacaggatctgaaaatgatccgggtccgcttttccagcttttttttctatgtaatcagaaggcatggaaggaagaggatggaacaatgcttttccataaaatggatgatccagatccagtcctgttatttctatctcatggtcaaataaggcagactggtctttcaggcagatagcccctgctttttttaattccttccggtattggcttccggatacaccataagtttccggctcccagtcgatccggttttcatggtttccttccccgcagtaaacaggatagcgggtggcaagttcttttataagggaaagggcatgcctggtctttgcatgttttccttttgtgacaataagatcgccgccgtttaagatagcatccggccgtattttatcaatagcccggatcagtttttcattgtccggtccaaaggtgttttcatggagatcggacagaaaaataaaggtacggtctttggatactttgtcactataaaggttcatttcctccacagacagagccttcttttcatattctgatctgccaaggcatatggcagcaactgcacaggcggtagcagtcagataggtgatcagcatgttgtctccttactcgttttttgttttgctcagtaaactcacaaaccccgcgctatcgcgctccactgtctgctatcgcagacggtttgctccttacattatatcttttatagttattattttcaagaaaatagtgaaaacgtgggtcttgacggacggaaacaggcatgatacgataacatacgcgagaaaagatatatagtatataaaagataaatgaaacacaatatatagtatacaagcaaaaaaaacagacaggaaaggtgaaagaatggactgcagtaagataaaggttgtaaaaaaagacggtaccagggaagattttaatgtgcagaaggtgctttctgctattagcaagtcagcagagagagccatgatcacattttcaagggcagagcggaattttatctgtgaatttgtggaagaaaaggcagaggagatggaccaggaactgatccccatcgctcagatgcacaacattgtagaaggagcgctggaaaaggtcaatccgctggttgcaaaaagttaccgggactaccgcaattataagcaggattttgtgcggatgctggatgatgtatacaagaaaagccagtccattatgtacattggagataaggaaaacagcaatacagacagtgctctggtttccaccaagcgcagtctgatctttaatgagctgaataaatccctttatcagaagttttttatgacagtagaagaactgcaggcgtgcagggaaggttatatctacattcacgatatgtctgccagaagagatactatgaactgctgtctctttgatgtaaaatctgtgcttaccggcggttttgaaatgggaaatctgtggtacaatgagccgaaaacactggatgtagcctttgacgtgatcggtgatattgttttaagtgcagccagccagcagtatggcggttttacagtgccaagtgtggagaatatcctggcgccttatgcagaaaagtcttatgcaaaatatcttgaaaagtacagaaaattgggattgccggaagaaaaagtagaagaagttgcctgggcagatgtacagagagatatggaacagggatttcagggatgggaatacaagtttaactccgtttcttccagccgcggtgactatccgtttatcacaatgactgcaggtacaggaaccagccgctttgcaaaaatggcaaccatgaccatgttaaaagtgcgaaaaggcggacagggaaaagcaggccacaaaaaaccggtactgttcccgaaagtggtatttctctatgatgaaaagcttcacggaccaggcggtgagttagaggatgtatttgaggcaggtattgactgctccagcaagaccatgtatccggactggctttcccttacaggagaaggctatattgccagcatgtacaaaaaatacggaaagatcatctctccaatgggctgtcgtgcgttcctgtcaccgtggtatgaaagagggggcatgcatccggcagatgacaaagacgagcccgtatttgaaggacgttttaatatcggtgtagtcagccttcatcttcctatgatcctggcaaaggcaagacaggaaaaccgtgatttttatgaggttttagattactatctggaactgatcagaaggatccatatccgtacctatgcatacttaggtgagatgaaagcttctaccaatccgctggcatactgtgaaggcggattttacggcggccatttaggtcttcacgacaaaataaaaccattattaaaaactgctactgcttcctttggtattacagcgtttaatgagctgcagcagctgtataataagaagtctttagtagaagacggtcagtttgcactggaagtattggagcatatcaataaaaagatcgatgagtttaaagaagaagacggcaatctctatgccatctatgcaacaccggcagagaacctttgcggcctgcaggtaaagcagttccgtaaaaaatacggcattattgaaaatgtatctgacagagagtatgtaagcaacggcttccactgccacgtaaccgaagatatcaccccgattgaaaaacaggatctggaatatcgtttctgggagttaagcaacggcggcaagatccagtatgtaaaataccccatcagctacaataaagaagccatccgcaccctggtgcgcagagccatgagaatgggattttacgaaggcgtaaacctgtcactggcttactgcgatgactgcggccacgaagaactggaaatggatgtctgcccggcctgcggcagcaaaaacctgacgaagatcgacagaatgaacggatatttaagttattcaagggtcaaaggcgatacaagactaaacgaatccaaaatggccgagatcgcagagagagtaagcatgtgatgaacgcagaagaaaaacaagcgccgccgaaataccgggtggtcgtaaaacagtaaaatcaaaaaatggtgaaaaccttgtgttttcaaggggcggcgtgacttcggtcacgccgtttcctttttcatcaactcattcagagggataaagcccagcccgtcgtacctgatatggatgtgctgtacccgcttgccgctggacttgtccggtgcgtccacatagatggcagacaccagttcgcgcagagcatagccgtccagttcttcaatgccgacatacttgtgcgctttctgaatgaacttttcaatgttttcgttctgtcgttcctgtacttcaatctcctgctgcaaggtaatcgcttccgcttccaactgcttctgctccgcttcgtaggtctggctcagcatatcatagcgttcatctgttaaccgcccgctggcgttgtcctcataaatcttgatgaacagtcttttcagctcggcaatacggcgttcgttgctttccagacgctttctgcggatgcggatttgctcatagctttccacgcggagctgttcctccatgatcgtgcggaaataatcctcgtgtcgcaggatataccccataactgcctgaatgtgcttgagaaccagccgatccaagactttgacgcgaatgaaatgcccattacacttttctttgcttttgcggtgcagagagcagtcaaaaaagtcttgatcgagatcaccgttgttggatgaaccgtacagcattttggaaccgcagtccgcacagtaaacaagtccggagaaaatgctgcttcttcccgtgcggatcattcggtgacgctgctggcggatctcctgcaccttttcaaacacatcatcgtcgataatgcgctcgtgggtattggggaaaatcgcctgcttttcaatgggattatccctttgtttcttatcccagatagaattggtgtaagtcttgaagttcaccgtgcagcctgtgtactcccggcgttccagaattgccacaacggtactgcttttccaatcataaggatcttccggctttttgttcgggcttttgatgccttgcaatgccttataactggcaggagttaaaaccttgtccgctttcagttggtttgcaatctgctttggacctctgccctccatgcacatggagaaaatacgccgcaccacatcggcggcaacagggtcgatcttccagcgtcggggattgtctgggcctttcaaatagccgtagggaacattggttgtcaaaggaacgccgcgttcaccctttgccttattgacagcgcggatcttgcggctggtatctcgcgcgtaaaactcgttgcaccagtttttgatacccgcaaaatcgttatcggtgctgttgggatcaatggtgtcgaaattgtcgttgatggcaatatagcggacaccgtactgcggaaaggtgaaattggtgtaaagtcctgtcagagcggaatttctacccaggcgggataggtctttggtgatacagacagccacccgttccgcttcaatttccgcaagcatcgcttgaaaaccggggcggtcataggtcacaccgctcacgccatcatccacaaaaaatgtgggattcgggaaatggtgctcccgtgcataccgcaaaagcatatccttctgattttcaatggacaaagactctccggctcgttcatcttcttgcgaaagacggcagtagagtgctgtgattttgtttgttgctccgttcatttctgaatcctcctttggtggagcaactgtcagtacaggattggttgcttctattgtaccaagagactctgtatttgtcattcggaatcctccatcttttctgcaaactttttgctggtaatacgctctaacttgcggacaaagctctctgttccctcatagctgcccgtgacggtgtaaaccgtgccatgaatgacctcggtgacggtcaattcgggaacccagaaagcggacaggtttttcgcgcagagatgcccgtcctcgttaaagtagcagttgcgccggggatgatcggacggtaagggctgcggtttgagatacgggtctggattggagaagtaatattccgctggctcgtcgtgatctgccttttcccattcctcgatttctgccagcagatcagggtcgatttcgtgttcaaattctttgttctcgttcataagtgcctccagattttctattcaaattagtgttcaatttcctgccttttctgccgcgtcgcggtgttctgacgctcctgctcatgctgcacctcgtagatgttgtaatgaatcgcccagagctttttcgcgtcggcatggatcggtgaaagctccgtctgaatgtctttgtattcctgctccaactgctcccgttctctgcgccatgcggtgatgggcagtttgccgtccttgaagtgcagtttcagcttgcgctctgccatgtagaacgtccgcaactcgttatcgtgttcggatttgtatttctgcctggatttctcaaatcggatggatttcagcttgtccgcagcgggcttgccagacttgtagtagtccaccatccgcagcagttcgtccacttctttgatacgggcttgctttgacgatgccgactttttcaacgtatcgatcttgtcctgcatggcatgaagcgtattttccagatcgtccacggtgtaaaggtttttggattgtaaaaagctgaacgcctcggcgtaacgctgcaaattggcgttcttcgccttattgctgtacgcgcccttgttgcgattggcgcaatgcagcgccagcagatcgttgagcatgggcggctgtggcttggcaagctcggcctttacgtcctttagccagccgatcagcgcggtgatcttttcttttgtctcccgcagcagcgcgttggttttccggatgaagcggttgagatcgcccttgtcggtgcggatgccctttgcctccattgcccggacggtgggaccctcgtgctgcgtggggatctgctccacgccctgacgggcaaagctgcgatggtcgatgcgacagtcaaagcccttttcggcaaacttggcattgcacatctcagcccatgcatgccgccaggcttctagcgtttcgggtttgccccagtccgtcgtagaaatggcgttgaacacataattgcctgcctcgtccagaacgcgctcaccgtgttcgtccagcacatattcccgccgctgtttgtttccccacctgccgtccagctcaatgggacggatgggacacatgacgtgaaagtgcgggttggaaatgctgccgtcctccttgtcggattgatgcacggcaaagtctgtcaccatgccccggctcacaaaattgtccaacagaaattgccttgcaaggtcgatgttctcctgcatggaaaactcattctgcaaggcaatgtcaaagctgtaggcaagctgcgctttcttgccgcgctcggctttttccacggcgttccagagcgtttcgcggtctgcgtattctggcggggcgtgtgacgggagcagaatttcagagcagatcacgccgccttttcgggtgtagtcgctgatctcgccgtagtattcgctgtgcagcttttccccggcacgataggcggcagcagccacggcagattgccccgcgctgcgcttgatctgcgtcacatgaaaatgaaagagtgcgatattcaatcacctcctgcatggcggctgacagcttccatgagaagcctttgcgcgtctggcagggcgaaaacccgttctgcaaaagtgtaaaacgcggtttcgtccaactctttcgtctgcggtgcgacactctcgatggctgcgccgcgagtgataagccggtgcgcccgcttgcgccgttctcccttttcatagtaggcggcgcggttttcaagacgctggattttgtgctgttcctgcgcaagctgccgctcgaccttttctttctccgcttgcagcttctcaatttctttttcgtgcatgatttcaacctcctgactgatagatggatagaaaaagaccgcctacattttcggtagacggtctgcgtgatgatatggaattttcaggctttgcggtgaaaatagactgcgccagcaaactgtttccactgcaaagtgcgctgggatagctgccgtggcagcgcaagggaggcactcccttgtacggagcaacgcaacgcaaaaaagcccggacatttgactgcccgggctgtctgcctcgcagagcgcacatactctcgtcaggagagtatagaagtgcgcccttgttaccaagggattattttatgtcaatcgctccgtttatttgttctcacttaatcatttcaacgccttcatttgttgggcagaattgaagcgcatcttggactgtcataaacgctccggcatcattccagctatttgtcattcgtttttccattgctgtcattgcaggatattggagccagcttcgttgatgagtgtaattgacccaactgctgatgatatagccatcctgcatctccgcaatgggataagcaacatagccacgataattttcaccttgccttggcatagaaaaagtggcaaaaacatcggtacttgtttgctctccccagaaaatgctgttggatgtaaaagtttgattgtcaagagaataataaggggcggcgaaggtttccccacccttgtcatacagcacacgtccagttacttcaccgttagaagcccatctatctgaaatatctcgatatacgggccaaagctgaatcgactctgtgccgtaaaatccaggatcggtagtccaaaggaaatgatggaaaatcatccatctttctcgttcgccaggtatttgcactccaacgccggtaatgcgtaactcttttacatcatagacagtcttttgctcaatatggcgtttctctccattactatactctgtagttaccgttctgccgtcattcactggttcgtccgtgatgtcaacgacaacctgtaaagcaccatcacaagctgcaatgtcttctggcgtgagatcgttcaaaacatattctgggaagccaagttccgtgagatggctcttgattacctctacttcagtatgttctgacgaatccactgtactccaggccattggataactgccaccgaaaatatagccaaaagcacagccgatgataagcactgaaaggagaacgagcacgatacatctgtctgttaccttaatagatacggtttgaattgaatacccagcttcatcaagttcttttgagagcatatagatattacggataatgaagatgtatccaataaccattgccccagcaattaccagtccattatactgaataacagccagaacgcacatgagtgcataccagataatcagtgcaacggcacctcccgctcgcggaggaagatttacttttctctgcacagctctgagtccacgccagagacaaaagaactcgacaagcagaagcaaaaggtttgcaacggttagcaccgatgtgacttggggagtaaaaattgtgctttggataatggtcgtatttagaatcagcatcgggaaaaagtatgccgctcggattactgttataataaagcaatttctaaaccatttattttcacgccatagagaacgaaaccctaatagtgacaacaccattccaacggcaggaagaatataatttaggcaccaaaagttcagcgtgatagcgcaaagtgccatgccaatgagtacacggctcattgcttttctccatggtgttacatcttcaacaacatcatcagggggaaaatctaaaacgcttttttcaagcattgtctcaaaatctctttcgttcatggattcccattcatgattactcatgcacttcacctcctaacatcttgcgaagctgctttttcaagcgatacagttttccctcgaccgatctttcagtcatccccagctcggaagcaatttgggctgttgattgtaagtaataatattttctgtaaaacagcatcctgtccttgggcgataactggcgcaaagcgtaattaaccgcagattgccgttctttttgtataatcagttcttcaggacttggctccgatgatggtatatcgtctggaatttcttcaacactattatggcggtgagtatccctcgtatagttcagcgcagcatttctggtaatcgccgtcaaccacgtcttccaacttcctcgttcttggttgaactgttctattttttcccagacacgcattgctacttctgaaaggcagtcctcttgatcctgtggattttgcaaaataggcgcaataatgtatctcatcagtggcccatagtgcaacaataaggcgtccatgcctttttcatttctttgaagcagcaattcgataatatcctgttcttgcacagcatcgcctcctttcggatttgttttctatttaattatacacgagttgacaagaaaacccacagatatttcaataacttttatgggaccaatttgacccatttaaaaactgattgtttgctcgttcttttgcaaactgccgccgttcctcgctatacggcgcagtcagccgaaaacttaaccgccctttctcgatctcaaaggtcagcccgccttgctcgtcatcgtcggtctggcggcagcattgcggatgctttgccgcaaatgctgtcagccgctttttgagatcggtgttgtggatctgtacctcaatgatgcggctatgctcatcaaaataaatcacggttgtcttttgctttttggtaagccctgttctcataaaacctcctgcataaaaaaagcagcaactaccatttcggaagttgttaccgcttttgccacacgatgtcataccccagcgcgtccgccaactctaccgcctcgccatagcggagcgaaccgcgcttgagcttgccggagagattgggaacgctgcggctccagccgtattcatcggagaggtagtccaccacctcggtcatggtcatgccggtgcggacgatgtaggacttgatctcattgcgataggtttcagattttctcatattcaaactttcctcctgttttttcgatacgccttatggtaaaatgggtttgttaaatcgtgacacccgttcgccatagggcgctggtttttgatgcacggctttcggctggaaatactgccaatgatacgttggtcacaggcggcaccttccgcttttgtcgtttgatgtgtctttgcgtgaaacggcgaaatatcatgttgaacgacaaacgtcgttcactgctgaatagcgctctattccgtgcagataaccgcacagagcagaaaactatttcgccgttttcacttgctttgatttttacattcgattttgccgatctttccgaacgtcgttcctgcccggaggatcgctcccggcgtttcgttctccttggtgcgctggatgcggcacttcgccagaggacatatcccgttcggacggtcatgcaattttcaaggttcaggtgcgattgcaagaccattttagcgaaaaatatagccctctcccgtatatccaagaggtcggaaaatgcgccgaaaagcgcagatttccacgcttatggacaagaccgggaaagggcagaaatttgaagggaggacaccgctatgcagccaaaactcaccattcaggaacggctcaaagacctgcgcgtagagcgcggtctgacactggaacagctttctgcggaaacaagcatctcaaaatctgcgctgggaaaatacgaagccgacgatttcaaagacatcagtccgttcagcatggtggcgctggcaaagttctacggcgtgtccaccgattacctgctggggctgacagaacaaaaaaatcacccaaacacagagctggacgctctgcatttgggtgatgatgcaatcgaagtattgagaacgggcaagttcaaccaccggctgctgtcggagttgatctgccacaaggatttccagcgtttcatgctggatgccgagatttacgttgaccggatcgcggatatgcggatcaacgacatgaacgccgtactggaagcggttcgacagatggcattgatgaaaaacggcggcgatgcaaacgacctgtacctgcggacgctggaagtcgcgcagatcagagaggatgaatatttcggaagcctgattgtggatgacctaaaagtcattctccgtgacattcgagagcagcatcgccccgacactatgactgcggatgaaagcgccctcgtagcaaccgtacagggtcagttgcaggatgcgatgaattttgagggcagttccgaggaaaagcaagtccgtgcgctcatggcaacaatcggacttgattatgacacacttacgaaggaagagtttgcctcagtcatcagcggacttaaaaagtccaagtacctgaaaagtcccatcaaccagcgtggaaaagcacgaccgcagctaccacacggaaaaggcaaaaagaaacgcaaataaggaaaaaccgctatattcaggttttcactgaatatagcggcttttcgttgtccaaccctgcctgacagatgctcatttcgtaatttcggtctaaacctgttttacgaacacctgtcaaaaggcggcatttgtttttcttgcgtcatcaacgagcaaactgcctgcgatagcaggcggtggagcgcggtagcgcgtgtttgcgagtctaacgaacgatccgtttgcgatagcagacagtagagcacgctagcgcgtgtttgcgagtggaccgtacacgaacaaaagtacacaagaaaaagacagcccgacaaaatcatcggctgtctttttctttctcttttttattccttttcttccgataagacccgtcagccaatccttccagataagattctgcccggatcttattagacggaccaagctggttataaaggtcaagtacatatttctgttgcttgtttaagatcgtctggctgccgtctgtactgtaaaactctcccatggagataccgaatacctggcatatatggcggagtgtaggaatactgggcacagtggtgcggcggaaaagatttcctatgctgtttggggaaatatccatttcctttgcaaggcggtaatggctccaaccacggtcattacacagctcctctatgcggtccagttcaaaactcatagcttctccttctgtcaagtacgattatattagtattttatcccagtaacacaaaaaacattagcttgaaaaagagtgtataaattatgcattaaatagtgcatacagagcacatacaggaaaatcaagtggaaaaatcccctggattatgatagactgataccaacagcattactgtaaatgaaaatggaggcgggacagatgaaaaagtttttggaagaattcaaagcgtttgcattaaagggcaacatgatcgatctggccgtaggtatgatcattggcagtgcatttacatcaatcgttaattcccttgtaaatgatatttttatgccggtattaagtattttcactggaaagatcgatttttccaacatgtttattgccttagacggcaacaaatatccaacactggcagcagccaatgaagtgacagctaccattaattatggttcttttatcacccaggcgatcaatttcttgctgatggcttttgttgtatttatggtcatcaaggcgatcaataaactggaaaaaattggaaaggcttcggaagcaccaaaagcgcctacagagaaagaatgcccatattgcaagagcatgattcctattaaggcagttcggtgtccacattgtacctcagaactggagaagtaagatatgcgttaccataacataacgaaagacgatatgctcaatggagaagggctgcggactgtgctttgggtggcaggctgcagccatcattgtcctcagtgccataatcctgttacatgggatattaatggcggactggtttttgatgagcaggcaaaagaagaattatttgaagaactgaaaaaagactatgtttccggtgtgactttcagcggcggcgatccctttcatctggaaaacagggaagagatcggggcacttgcaaaagagatccgggaaaaatttccagataagaccatctggctgtataccggttatgaatgggaagagatctgccatctgtcatttctttccaatatagatgtgatcgtagacgggaaatttaagatcgaagaaaaagacaataatcttcactggaaaggcagtgccaaccagcgtgtgatcgatgtaaaagcatcccttcgcgcaggagaggtccgtctttaccaggagtaatgaaaagaagaaaagcagcatagaaagacaggagtaaacacacacatggaaagaattgcaaaatttcataaagtaagttatgaacagtttgaaggtgactggaaagataccttcggtcccattgaaacagaagagatcaaaagaatttatgaagggatccgtctgcctgcaagggcaactgcaggatccgcaggttatgatttttatacaccggtagctgtgaccatccgtccgggtgagatcgttaagatccctacaggcatccgtgcagagatgaatgagggctgggtacttgctgtattcccaagaagcagccttggatttaagtaccgtctgcagttaaataatacagttggcatcattgacagtgactatttcttctctgataatgagggtcatatttttatcaaactgaccaatgatacaaaggaagacaagaccgtagaactgtcagaaggtgcaggatttgcccagggaattttcttcccatttggaattacagaagatgatgactgcagcgaacagagaaacggcggttttggcagtacagacagtaaaagaggttagtaatatgggaaacagacctgtaaacagaagcaggagaagcgcagggagaggaagatattccagtggaaggagcagatccagtacccttagaaggcgcagaaggaacaggcgcctgaaaaatgttcttattggactttgctgtatccttttagtggtccttctggtatttggcgttggaaaactggtggaaagatttgccggtcccggaaagacacagctgagaaaagagggaattgaaaaattaaattccggtgacttagaaggcgctgtggctgattttgaccaggctcttgaaaaggcaggaaacaagtcaaataaagcctctgcatttaatgcagatgtgttgtggtaccgggcagaagcggaaatgtttctggcagactatgaggcagcttcccacacctatgacctggtagcagagcagggcggagataagatctccagcctgtatatgaaggcggtctgcgcaggaaagttagaggacaaggatcaggcagtttcttattacagagaagcactgggaatggaaaaagaaggcgtccgttcaccgggatatgaagaggcactgattgctgcaggttctgcctgcgtaaaggcacaggactctgaaacagcaaaaagtctttatgaagaggcattaaacagtggaaaaacgggagaaaaactggaaagcaggatttataatcagctgggtctatgccagatggctgaagaggattatgaaacagctgctgatacgtttgacaagggatataatgccctgatcaccggatataaagcaggaaccggggcagaactggatcaggcagctgctgcgatcccgaaagaagatacccagggacttacacttttaaaagaactggcttataacaaggcagtctgcctggaatacagacagcagtaccgtcaggcacaggcagaatttgagacttatatcaaggtatttggggatgatgaagacgcccggcatgagatcgactttttaaagaccagacaggaggaataatacaccggtgattgatttaaaggaactggaagaacgggtaatactggcagcagtaagtaccagtgaaacagatatggcagaacgctctttagatgagttaaaagaactggcagatacagccggggcaaagactgtaggccgtgtgatccagaaccgggaaagcgttcatccgggaacctatctgggaaaaggaaaactgcaggaactgcgggagatgctttacgaaacaggggctacaggcgtgatctgtgacgatgaactttcccctgcacagctcaaaaatctggaagatatactggatacaaaggtgatggaccgtaccatggtcatcctggatatctttgcagccagagccaatacaagggaaggcaagatccaggtagaactggcccagttaaaataccgtgccatccgtctggtgggaatgcgttcctctctttccagactgggaggcggtatcggtacaagaggacctggtgagaaaaaactggaaacagaccgccgtcttattcaccagcgcattggtcagttaaagaaagagctggaagatgtaaaacgccaccgggaagtgaccagacagcaacgtggaaaagaccatgcgttgacagctgcgatcgtaggctataccaatgcaggaaagtccacgttgttaaatcgtcttactggagcggggatcctggcagaggataaactttttgctacgctggacccaacgacccgcagttttacactgggagacggacagcagatccttcttacagataccgttggttttatcaacaaactgccccaccatctggtagaagcatttaaaagtaccctggaagaggcacgctacagtgatatcgtccttcatgtagtggactgttccaatccccagatggatatgcatatgcatgttgtaaaagaaactttgcgggaactggggatcacagataagaccatcgttactgtgtttaataaaacagaccgtttagaagaaagcggcctgccgattccaagggatttctccgcagattaccaggtgcgtatttctgctaaaaacggggatggtttaaaagaattagaggagatactgggtaatatcatccgcagcaggagagtttatctggaaaagacctattcttattcccaggcaggaaagctgcagaccatccgcaaatatggacagctgctttcagaagaatatacagaagaggggatcaaagtaacggcctatgtgccggcagaactgtttgcaggactgtatggggatggaccggaagaaaaggaatgatgagaaaaaggctgccgcaagaggaagaagatctttgcggcggcctttttgcagattttggataggtttgtgccggtttttcttattccctggctttttcaagggcattgtctactgcttttaaaagtgtcatacaggtataacgggaagactcagggaacgtaaggtctttggtagactgggtgtttaagatctggggcgcaagttcattcatagaaggctgcattaaagggtacatggttgaaactgcttcgtttaaatggaccaggcttacatccaggatctggtcagcgtctacagtgacttccacatttacatgttcatttccaagagtgaggctggcactgtatttgccgggtatgtacgtgctggcagaaggatcggcctttttttcaggacggaacataataaagcacaggatgagaagaaggatggccagacctacgaaaatggcagtgtagatcacttctttcatccgcagcactacgatttttgtcttggagctcatgatcaggacctctggtagaatttgttacagcatatgaaaggaaaggtgaaaatatgtcattgcagtttattgcagggggcagcggctccggaaaaacaaggtatctttacgaaaaggtgataaaagagtccgaagaacatccggacatacagtatctttttattgtgccggaacagtataccatgcagacccagaaagaactggtgcgcttacaccccagacatggacttcttaatattgatgttttaagctttaaacgtcttgcatacagggtttttgaagatctgggagtacagctgccccaggttttagatgatatgggaaaatccatggtcatccgaaaggtagcgggaaaactgaaaaaagaactgaaactgtacggaggccatctggaacagccaggctttatcaaccagttaaaatcccagatctcggagctttgtcagtacggggtaagcgtagaagacctggcaatggtagaggaagaaacagaccgtgtgctgttaaaagataaactgagggatctgaagacggtttatgggggatttaaagattatattgagtctcattatattacggcagaagagatcctggatattctgtgcagaaaactgccacagtgggaacctttaaaaaacagcgtgatccttttggatggttataccggttttacgccggtgcagtaccgtcttgcagaactgtttatgatccacagcagggaggtgatctgctgtgttactgcagatccaagggaaatgctttataaagaatgtaccatgcagcatttattttacatgggacggcatactgtatgcaggctgagaaaaatggcagaggaacatcatattcctgttttaaaggaagtatggtgtgataaccgcccggcctggcgttttaaggaaagcccccagctggattttttggagcagaatttataccgttataatgggaaaatatggaaaaatgatcctcaggacattcagatcttccggggaaaaaatccggcagaagagacggaatatgtgtgcagctgcattaatgaaaaagtgcagaaggaaggcatgcgctaccgggatctggcagtagtcacaggagatctggcttcttatggaaaagagatcgcccaccggtttgatgaggcagggatcccgtattttctggatgataaaaagagtattctggaaaatccttttatcgagcttataagggctgcgttagatggtgtaaaagatgcttcttacgaaagcattttccgttatctgaaaacaggttttgtctatgatgaaacctattccagggaggaagcacaggttcttacagaccggatggaaaactatgcaagagccctggggatcaaaggctggaaaaactgggatatgacctgggaaaagccatgcagaggcggggaacggctgagtctggaagaactgaaccagtaccgtcagtgggtgttagaacctttaaaggtcctgcgccaggcttttaaagaggaaaatgccaccatttcttctgttaccacggttttgcgccaggtccttgaaagcatgaagctggaagaaaagctggaaagtttcagcaactattttctggagcggaaggaaccgggagatgagaaccgggccagagaatacagccaggtctatgagcgggtcatggaactgttagaacggttagagggccttttaggggacgaaaaggcggatatgaaaaattatatccagatcctggatgcaggttttgaagagatcaagatcggtgtccttcctgcaacagcagaccaggtgatgatcggtgatattacccgaagccgtctggagtctgtaaaagtattatttttcacaggtgtgaacgaaggcattgttcctcagagaaaggcgggaggaagcctgttaaatgacggggacagagaagtgtttaagagccttcatatggaacttgcacctactgcaagggaagagggctgtatccagaaattctatctgtatctcatgctttccaagccttccaggcagctggtgatcacctatgcggctatgaatggtcagggcaaaagctgccatccttccagtctgatcggggagatccgcagactgttcccggaaatggtgccaagggaaaagcgggaagaggaatggccggtatggacagcggaagatggtttaaaaaagctgatggcaggactgcgggaagcaggagataaaaatctggaacagttaaaagaagcccagggaacttttctggaattgttccgtcgtttttatggacaggaagagtacaggaaactggtagaaaaactgacagatgcagccttttttgtttatgaagataagggaatcggccgtgcggcagccagagccctttacggacagaaacttcagggaagtgttaccaggttagagcagtttgctgcctgcgcctatgctcatttcttgaaatacggtctggaattaatggaacgtcaggagtaccagttagaggcagtggatatgggaaatctgttccaccagtccttagaccagtgctttgaggtgatccatgaaaatgggatggactggagcaatattacagaagaagaacgaaaagaactggtgaaaaaatgtgtggaccaggtgacatcccagtacggaaataccattatgtccagttctgccagaaatacttatctggcaaagcgtgtggagcggattaccgaccgtaccatctgggcgctggcagagcaggtgaagaaaggagattttgtgccctccggttttgaagtgtccttttctgctattgacaatttaaaggcaatgaagatccgcctgtcagaggatgaagaactgctgttaaagggccggatcgaccgtctggatctctgtgaagatgaaaaacatgtgtatgtaaagatcattgactataaatcaggaaatacctcctttgatctggcagcactgtactatggcctgcagcttcagctggtggtatatatggatgcggccctggaaatggaagaacggaaaaatccggaaaaaaccgcagttccggcaggaattttctattacaatatcaaagaccccatgatcaaaaaagaaggggaaatgacaccggaggagatcgaaaaacagatcttaaagcagcttcgtatgaacggactggtaaacagcgatctggaggtgatccatcacctggatcgtgagatccagaaggagtcagacgtaatacccgttgctgtaaaagacggttatgtacaggaagcaaaatccagtgtggcaggagaagcacgtttccaggctcttcgccgatttgtgggaaaacggttaaaacagtccggacaggctattttaaaaggtgaaaatggactggcaccttataaagacggagacagaacggcctgtgattactgcccgtaccatgcagtctgcggttttgatacgaaaacggcgggctatggtttcaggcggcttcactctatgaagccggaggaagtatggcaggaaatcgaggaaaagggtggcatgaaggaagataaaaacggggaaggggatgaataaaagatgaaatggacagaaaaacagcagcaggttatagacagcagaaacagaaacctgctggtatctgcagcagcaggaagcggaaaaacagcggtgctggttgaaaggatcatttccatgatcagtgaaggaacccatcctttaaatattgaccagcttcttgttatgacttttaccaatgcggcagcttctgagatgcgggagcggatcggggcagctgtggaaaaaaagctgaaagaagatcctggaaatgagcacctgtggcttcagtcagccctgatcccccaggcaaagatcatgaccattgacagtttctgcctggatctgatccggaaccattataatgcactggatattgacccggctttccgcattggagatgaaggagaactgactcttttaaaaggggatgtaatggagcaggtcttagaagaatgttacgaaactgcagatgacggctttttacagttttcggagcagtttggaagtggaaaatcagataaggcaatggaagatgtgatccttcaggcatggaccttttcccagagccatccctggccggaccagtggttagatcagtgcagacagcagatggaaaaagaagcagagggggatctggactccagtgagtggatgagatttcttttaagggatatcagccttcagatgggagaactggctgcccaggcagaagaagccctggaggtggcaagggaagaaaatggtccttttgtctatgaaccgatgctgatgaatgatgtgagccggttaaaaaagatcagggaagcagcagcttccggctcttatgaggctttttatcatgcagtatcagaactgacctttgaccgtctggcagcagccagaagcaaagagatcgatccggagaaaaaggcctatgtaagtgatctgcgcatcagggtgaaaaaagcggcagaaaaatgcagggatacctatggaagccagtcaccggaagcagcaatagaggggatcagaaataccagaattgtgatccaggttcttttagatatggtaaagcgttttgacgcagcctacacagaagcaaaaagagagcggaatgtgctggattttaatgacctggaacatcttacgctgcaggtgcttacagtagaagaggaagatgggacccgggttccttcacaggcagccggggagttaagcggacaatacgaagaaatactggtagatgagtatcaggacagcaatctggtacaggagacattgatccagagtatttccagggaacggctgggccagccaaatgtatttatggtcggtgatgtaaaacagagtatctaccgtttccgtctggcaaggccggagttatttatggaaaaatatgatacttacagcagggaagaaagcagtcatcagatgatcgagctgcagcagaacttccgcagccgtgccagtgtacttacctgtatcaatgatattttctatcagatcatgacgaaaaatctgggaggcatccgttatacagaagaaacggccctttatccgggagctgcgtttgaagagacagagaaaaaagcggggatcccggttcagtttcttgtggcagatacgggaacagaagcttttaagcagctagacgaagaggcagcagattatacagccagggaactggaagcaaaaatgatcgcagaacagatcaaaagctttacagatgaaaaaaacggtctgtatgtgtgggataaggacgggcagagttacagaaaagcctgctataaggatatggtgatcctgctgcgcagtatgagtggctggtctgaggtctttgtaaatgttctgatgaatgaaggaataccggcaactgcccagacaaggaccggatattttgcaacagcggaagtggaaaccgtactcagccttctgtctgtgatcgataatcctatgcaggatattcctatggcagctgttttgcgttcccctatggtcgggatgacggatgatgaaatggcatggatgatcgctgcctataaacggtatctccagaaaaaacaggaccgtggggtatatggtgcctggaaattgtgggaggagatctatccacaggctgtttctgatgaaaatccggatgaagatgaaaagaaagatccggaaacagagcagatccggatcggccaggtagagatcccgaaagcaaccgctaaatctatctggaaaaaactggaatattttgcagcttttacagaagaactgcgccaggacagccggtatctgcctgtccatgagcttctttatcagatctaccggaaaacaggatattacgattatgtatcctctatgccggcaggagagacaagaaaggccaatctggatatgctggcagaaaaagcggcagcctatgcttccaccagctacagaggcttatttcattttgtaagatacattgaaaagctgaaaaaatatgatacagactttggagaagcctctttaggagatgaaagcaattctgtgcggatcatgagtatccacaaaagtaagggtctggaatttccagttgtatttttagccggaatgggaaagaaatttaacaagcaggatgcctatggccagctgcttttagatgcagatctgggggcagctgcagatgaaatggatctgaacctgcgcaccaaggcgcctactcttaaaaaaatggccatcagacggcggatggaactggagtctatgggagaagagttgagagttctctatgttgccatgacccgtgcaaaggaagtgctggtcatgacaggaacagaccgttccctggaaaataaactggaaaaatgggatcagctctccttaacagatggacagatcccctatacagtcctgtccggggcaaattcatttttagactgggtgcttatggcaaaagcagcagttcccgctggacatatggaagtaaaacaggtgcagcttacccatctgatcggcagagaactgcagcggcagctggaaaagaaaaatgtaaaagaagagttgttaaaactggatacaaaacaggtttacgatgaacagatgaaagagcagctggatcaggcgctaagttatgagtatccttatctggaagatacaggcctgtatacacagatgtccgtgtcggaactgaaaaaacagagtcagatcgggcgtgaagaagaaaatatcggaacagaacgaaaggacctgtccgaagtcagactggaccacgaacatgaaatggaaccggaaagcagtgaagcagaagatggcaaaaaacagacagaaactggaaagaaaggtgcattcagaggaacggcttatcaccgtgccttagaatgtctggatctgcttgctgttacagaccagagaaaactggaaggggatctgttagacctgtttcagcgaggctttcttacagaagaagcctatgagtccatctttccatgggatatatggaaatttctggaaagtcctctgggtaagcggatgaaacaggctgaaaaggaaggaaaactttacagggagcgccagtttatggtaggtatccctgccagtgaaatgggaaaagggctgcagtctgaggaactggtgctgatccagggagtgatcgacgcttatatagaagaagccgatggatttatcctcattgactacaaaacagattatgtacccaaagaagatacacaaaaaggagaagaactgttaaaagaacggtatcaggtgcagttagattactatggaagagccctgacccagctcacaggaaagaaagtaaaagaaaaatggatctattcctttggattaagaaaagcaatccagttgggatagtaagatgtaatggttaaacagtaacgataatagaaaaccagaaaaccgccctgtcatctgaatgtaaaagatggcagggcggttttagactgtaagcctaacggcgtatttttaaattgctgatcagatcgctacaggaactttatgatcaaacggatgatactggtaattttccagcttgaagctgtctgttgtaaactggtagaaatcttttacctccggatcgacccataaagttggtcccggcaaaggctcttttttcagaagttcttctaccataggaatgtggcggtcataaatatgggcgtctgcgatcacatggaccagttctcctacttttaagccgcttgcctgagcgaacatatgcatcaggactgcgtactggcatacattccagctgtttgcagtaagcatatcctgggaacgctggtttaagataccgtttaaggtatcgccggatacattaaaggtcatgctgtaggcacatggatacaggtgcatttcgcttaaatcatggtgattgtagatattggacataatgcggcggcttaaaggattgtgctttaaatcataaaggatacggtctacctggtcgaaatccccttctgtataatgatgcttcacgcccagctggtatccgtaggcttttccgatactgccggtctcatcagcccaggagtcccagatatggctctttaagtcatgtacattgttggactttttctgccagatccacagcagctcatccactgcggatttaaaataagtgcggcgcagtgtgatcaccggaaactcttttcttaagtcgtatcggtttacaatgccgaattttttaatggtgtgagccggagtgccgtcctcccagaccgggcggacctcatggtcagtatcccagactccgtttgtaagaatgtctttgcaattttgtataaaaagctgatctgcataactcatgtggacttgtgtctccttttgccatagtataaactcatggacacgcgcgggcgcgctctgctgtctgcttacgcagacggtccattacctagtatagcaaatctcagacgtgcagtacagcaaaactgtaacaaatttcagtaaaaggtatctaaaaggtattggtatcttccaattttaaaaactacgtgttataattcttctggtagttaaaatataaacaaggggtttggacatgaatttgatcgcagcagcagatgaaaactggggaattggaaaaaatggcggacttttagcccatatttccggtgacatgaaatatttccgtgagactacaaaaggaaaaatagtagtcatgggacgaaagactctggaaagttttccagggggaaagccattaaagaaccgtgtgaacattgtccttaccggaaataaggattttgtgccggaaggtgtggtcatctgccacagcgtagaagagacacttgaaaaattaaaggaatatcccaaagaagatgttttcatcattggcggtggcatgatctacaaagccttcctgccatggtgtgaaaaagcctatattactcacgtttaccatacatttgaggcagatacctatctgccggatttagaaaagcaggcaggctggaagttaacatctgtcagtgacagatataccaatgaaccagaaggcgaacagcctgcaatggactatgaattcaggatctacgaaaggcagaatggatgaaatttcttgtaacagctgataacaatggggctattggcagaggagcacagcccttagtgacgatcccggctatgcagcagagtttcttaaaagagactcagggcaaagtagtggtcatgggacgaaagactctggaaggacttcccggtggacagcctcttggaaaccgcatcaatgtggtactttcagaaaatccggcctataagataaaaggcgctgttgtatgtcacaatattgacgaagcactggaatatttaaaacagttttcttctgaggatatatatgtgatcggcggagaaagcattttccggcagttcctgccttattgcaatacagtttatctgactcatattgattatgaatatgacgcagatgtaaaatttcctgtaaacttatggaagtctcaggaatgggagatggtggaagaaggagaagaacagacttatttcagtctttgttatgcaccggaaatttttgtaaggaagcagatctgatgtaaaaaaatttgacattgggggagtaaactatgaaaagtgacggtagtatgttcacactggaaaatgaagaacttctgatcacggttgagcgtcatggtgcccagctttccaggatctatgacaaaaaagcagacagggaggtcctgtggggcgcagacccggcagtatggaaccgccattcaccgatcctttttccatttattggaaaatctgtgaatggaaaataccgctatgagggaaaagaatatgatattacacctcatggatttgcaagagatatggactttgagccggtcctttgcgatatggatgagtgtacatacgtattaaaagacacgccggagacaatggaaaaatatccgttccattttgaactggagatcacacaccgtttaaaaggacgtaccattgaaacgtcctggaaagtgaccaacttaaatggaaaagaaatgctgtttatgatcggtggtcatccggcatttcaggttccggaaggaaagaacatttacgattatacccttgtatttaacaaagaaggggtaaaagcaggggaacatcaggacagtcttcattatcaggctcccaatgcagagggatatgaggaaagtattctgcagggagatttaaaactgacagatggaaaagttcctgtaacaccaggatttttcgatacagcactgacctatatgttcgatcatgagcagatcagcagtgtaggacttttgacagatggaaagccatatgttacagtattatgcgacggatttccttttgtaggagtctggaccatagaaaagacacacccctttgtatgtcttgaaccatggtatggagtatgtgactcaaagaattttaccggagagttaaaagaaagacagggcatccagagcttaaaagcctgggagacctgggaaaaaggttacagcatcaggatagagtgatctgcctggtctataatagaaacaataatgtccactggacataaaacattttaggagggaaaacatgtacaagattgtaaatgcagaatgtctggcagacaagatctatctgatggatgtggaagcaccccgtgtagcaagagcctgtcagccaggagaattcgttatcgttaagatggatgaagtaggagagagaattccccttactatctgcgatttcgaccgtgagaagggtctggtaaccatcgtattccagatcgtaggtgcttctaccatgcgtatggcagaactgaaagccggagattatttccaggatttcgtaggtcctttaggacagccatctgagtttgtaaaagaagacttagaagaagttaagaagagaaaatacctgttcgtagcaggtggtgttggttctgctcctgtttacccgcaggttaagtggatgcatgaacatggcattgatgtagatgtaattgaaggttccaagaccaagagtcttttaattctggaagataagttaaaagcagttgcaggaaatctgtacgtaactacagatgatggttcttacgagcgtaagggcatggtaactgaggttatcaaagacctggttgaaaatcagggtaaaaagtacgatgtatgtgttgccatcggaccaatgatcatgatgaaattcgtatgtaagctgaccaaggaactgggaattccaactatcgtcagcctgaacccgatcatggtagatggaactggtatgtgtggagcatgccgtgtttctgtaggcggtgaagtgaagttcgcatgtgtagacggacctgagtttgacggacatctggtagatttcgaccaggctatgaaacgtcagcagatgtataagacagaagaaggccgtgcgatcctgaaattccaggaaggcaagacacatcacggcggatgcggaaactgcggaggtgaagaataatggacgtattaaagagagtacctgtaagagaacaggatccaaaggtaagagctactaattttgaggaagtatgtcttggatataaccaggaagaagcacaggaagaagcaacccgctgcttaaactgcaagaacgcacagtgcgttaagggctgccctgtatctatcaacattccaaaattcatttcagaagtaaaagaaggcaagttcaaagacgcagcagcaactatcgctgagtccagtgcactgccagcagtctgcggacgtgtttgtccacaggagagccagtgtgaaggaaaatgtatccgcggctttaagggcgatcctatttccatcggtaaactggagcgtttcgtagcagactggtccagagagaacggcgttgtaccggctaagccagagaccaccaatggtatcaaggtagctgtgatcggttccggtccttccggtctgacctgtgcaggagatcttgcaaaactgggctacgaagtaaccattttcgaggcacttcatgagccaggcggcgttcttacttatggtattcctgagttccgtcttccaaagaccagagttgtacgtccggaagtagagaacgttaagaaattaggcgttaagatcgaaacagacgttatcatcggcaagtccgttaccattgacgaactgatggaagaggaaggcttcaaggctgtatttatcggttccggtgccggacttcctaagttcatgggtatccctggtgagaacgcaaacggcgtattatccgcaaatgagtacctgaccagaagcaacctgatgaaggcattccgcgatgactatgacaccccgatctacttaggcaagaaagttgccatcgtaggcggcggaaacgtagcaatggatgctgcaagaaccgctcttcgtctgggcgcagaagtacatgttgtatacagaagaagtgaagcagagcttccagcccgtgctgaggaagttcatcatgcaaaagaagaaggcgttatcttcgaccttctgaccaaccctgtagaaatcttaactgatgaaaatgactgggtaaccggcatggtagtacgtaagatggaactgggcgagccagatgcttccggacgccgcagaccagtagaggtagaaggttctgattacaccatcgacgtagataccgttatcatgtcccttggtacttctccaaacccactgatctcctctaccacagaaggactggagaccaacaagtggaaatgcatcatcgctgatgaaaccaacggcaagaccaccaaggaaggcgtatacgcaggcggcgacgctgtaacaggcgcagcaaccgttatccttgcaatggaagctggtaaagcaggcgccagaggtattgatgagtacttgaaaggcaataagtaatattttctaaatcctatttgaattaaaaacagatatccctttgcagttgatcgttaagaggctgcagaggggtatttttttatttttaatttataaaatttaacaggatttttatattttcaacaagtaaagattgtgctaatataaatacataaaaagcggctcttaatacgggggcgtacataggaggtaatgtgtatgggaactaacattattgtaacggctattgtggtcgtgtatcttctgtttatgttatggatcggctggtattcttccaccaagatcacaagcaacacagactttatggtagcaggaagacgattaggtccccttttaatggcaggaacactggctgcaacggagatcggcggtggcagttccctgggtgttgtacagaatggtatgtccggctttggactgagtgcttcctggtatattaccaccatgggtattgcctttgtaatcttaagttttattgcaccgaaattccgtgcggctactgttaagaccgttccggaatatttccgcagacgttatggcaaggaatgtggtctgatcacagcgatcatcatgctgcttcctttggtaggactgacagcaggacagtttattgcctcagcggttatcctttccaccatgttaaatattgattaccaggtggcagttgtgatcgtggcagtggtagttactgcttattccattatgggcggcttgtggagtgttacactgactgactttgtgcaggtattcctgatcgtcatcggtatgatcattgcaattcctttcgcattaaattacgcaggtggctggagcagcgtaactgcaaacattgagccgggaacattgagcatgtttaagggctatgatgtatttggcattatttccctggttgttatgtatacagcaaccttctctgttggacaggaagcagtatcccgtttctatgctgcaaaagatgagaaagcagcaaagggcggcgcatggctggcagctcttgtaaactttatttacgcatttgttcctactattttaggtatcattacactggcactgatcaacatgggcaagttcagcgcagataaatttgcttctgtaggcgcccgttacgcccttccggtactggctatgaacaccatgccggcactgatctgcggtctgctgtttgcaggcatcatttccgcaaccatgtccagttccgactctgacctgttaggtgccggatctattttcgcaaatgatatttacaaagcagtattaaaaccggatgcttccagccagtctgttatgaacgtaacaaagatcgttatgtgtctggtaggtgttgcatctatgtttattgcactgtttaatacccagagcattgtttctatcctgatgttctgctttaccttacgtgcagccggttccttcttcccatatgttatgggacattactggaagaaagcttccaaggcaggaaccattgcgtccctgcttgcaggaacaatcgttgttgtttatctggagcatatttccggaggcgtgctctttggcattaagttcagccagccgatcattcctggcctggtagcagctttcatcggatttatcgtattttctaagatcatgcctcctgagcatgagacaacggaattagcaccggaagaggatgactaaggtataaaaatatcccccgtctgtgatctgcaggcgggggaaaatatatgagatttgtttgaaaccgccactggcggtttttgtattttgggaagatttatccccaccaagataggaaaggaaaacgcattcttatttcgcagcctttacagctatctgaatggcttctgccattacttccgcagccagtgttccggtcatatttacatctgcaggcactcttgggccgcaggaagcagcataaatagaatcgccgtctgccatggttcctaccggattgatgcagcgggaataagcgctgcgggtcatggaggcgatcttatttaactcagccttggagaactcaccgtttgtgataatggcaccaatggtagtattggaatttttagcacggaacagatcggtctgctggctcagtttgtaaagtgcttctctggagtctgcaaagccgtccataccaggaagttttggtcctgcgatcttttcgccggtagatggatcataaatatcacccagggcatttaaaacaacgacagcggcaactttcaggcttcctgcgctgacagcataaattccaagacctgtttttgtggcatattcccgtccgcagatctttccaacactggctccggttccagcaccgatgataccgctttcaggctggttcttttccgcatcttcacatgccgcatatcccatggcagcatccggccgcacatctgcccggccgatccccaggtcataaatacaggactggcacactaagggtacttttgcaaagccggtatcatagccaattccatgttcctccagataacgcataacaccgtcgctggcagcaagaccaaaagcagagccgccggataatacaatggcattaataggattatcagccgtaacaggggaagtaagaggtgtttctctggaagccggacctccgccgctgatatcgcagccggccttggctccctcatcaaaacgaagcacagtgacaccagtcatggcatttaagtcctgggcatttcctatgcggagcccttcaatttcggtaatagaaatctctttcaaaggcggaaataatttcataataaacaaatctccttatacatctttataatatttttcccggacaaaactgcccgggaaatcgtattttcatgttaaattaagttatttctttaaagcagctgtcagtgctctggaaacagcacttccaagaatggtgcatacaacagcttcaatagcaccctgaatacctacaaacaggacaacaaagaacagtggattggaagttccaagtccggaagcaatgttctggatgtattctgtatggaagaagaacagtaccagggaactcataaacagcagggtgtttaacagcgggcaggaaaggcttgcaataacgaaagctccgtttttggaaactttcttaagagcagcgaagatcaggccgcacagccatccctccaggatacggggaactaataaagtaaataaaagaccaaatgggttgatctgtaataaagctgcgctgaaagcagaaccaccggtaagagccataatggcactggtcagaccaaaagcgccgccgcagatggcgccggctgttggaccaaggataatggcgcctacagcaacaggcacagttaaaaaggtaatggtaagtcccggggtacgcagataaccaagaggtgaaaatgccatgacaaagataatggcaaccataagagctaacttcaccataaaagtggtccgtgaacgggacatctcagaagttacgggatttgcagttgttgttttcattgtgttctcctttttcgctgataaaacggcactggttctatctgcatatctgcagtttcacagctccccctgtttttcagcctttatttagtttgttttggggatacaatgaacggaaacttaagagtaaaaagctcagttccagaccataagatcatagaaaatcaagtagaataaagttgtatacatgatacaggtaaaaagcatctggttacagccataaaaggtctgcacgggcaaattcctgcaaagtatataatttataaaaaggtctgatcatgatacattttcctaagaataacgttcaaatttaatatagcataaatctggaaaacagcaagtttttatgcaggtacaaaggaaaaaagcataaagctggcagtacatttgacagaaaatccagtagcatttcagggtaaatgtggttataatgtaatgggtgccgaaaaaaacaagcgccgcgaaagcggcatttgtttttttcaagcccattaacgaacaacccgtctgcgaagcagacagtagagcgcgtagaaaggacacaccatgtatcaaatagatttcaccaccccgatccacatccatttcatcggcatcggcggtatcagtatgagcggtcttgctgagatcctcttagaagaaggcttcactattaccggttccgactcaaaagagtcccctttaacccgtcacctggaagaaaagggcgccagaatttactacggccagaaagcctctaacattgaagccgagccaggcatccaggttgtagtctatactgcagctatccacccggacaatccggaattcaaggcagcaaaagacaagaacatcccaatgcttaccagagcagaactcttaggcgaattaatgcgcaactacaaagagtctgttgcagtttccggaacccatggaaagacaaccaccacatccatgatcacagacattcttttagcagctgacactgaccctactatttccgtaggcggcattttaaaagacatcggcggcaacatccgcgtaggcggaccggacctgtttgtaacagaagcctgcgagtacaccaacagcttcttatccttctatccaaccatagaagtgatcttgaacattgaagaagaccacttggacttcttcaaagacattaacgacatccgtcattccttccgcttatttgcagaaaaacttccaaaaggcggacttttagtcatcaacagcagtatcgaaaacataaacgaaatcacatccggcttaccatgccgtatcgtaactttcggaaaagacctttccagcatgtatacagcccagaatatcacctatgatgaatttgcaagaccttcctacgacctggttgtccagggtgagatcgtcaaccgcattaccttaggtgtaacaggcgagcacaatgtatacaattccctggcagccattgcagtagctatggaactgggcattggctttgacgctattatgtccggtcttaaaaactttaagggaacagaccgcagatttgagaaaaaaggtgagatcggcggcgtgaccattatcgatgattacgcacaccatccacaggagatcgcggctacactgtcagcggctaaaaattatccgcacaagaaactgtggtgtgtattccagccacatacctatacccgtacaaaggcatttttagacgaatttgcccaggcgctttccgcagcagatgaagtgatcctggcagacatttatgcagccagagagacagataccctaggtgtaagctctgctgacattgcttcccggatcgaaaaactgggaacaccagctcactatatcccatcttttgatgaaattgagacatttatccttgaacattgtatgcagggtgatgtgttgataactatgggggccggagatatcgtaagagtgggagaaaagctccttggagagtgatgtactctcgatttgtccacaatatccacagcgttttcaacatttttcagaacgaaaaaatgtggatttccagattaacataatataatgtcgcacgatttaaaaacataaggttttatgcggagaagacaggtgtatgtcagtgtggcagcaggaaaaacggaaaccgctgtccacattatccacaatatccacatttgtggatgtgtaaaaatgcacctgttttcttttttatgtggatgtgttatgatgaaagcaatgaggagtggtaaggatgagcaggatttttaaggaccggttaagtacaggtgtgacccctgtagccgatgcatttattgataattatatggcagctgccaacggggagtatgtaaaagtttatctttacattcttcgccatcaaaaccaggaagatctgacgttagaacagatcgcagatgccctaaaccatacagaagcagatgtaaaaagagccattaattactggcagaaggccggggtcttagaaaatgtacaggataataccttggaaggtatatcagcagaacaaaatcgtactagctggtctatagatatagaagtacccccggcggcatcaaaggaaacagctgcatcccaggcacctgtttcagctcctgcctattctgcagaacaggtaagccgtttaaataaggatgaggaattttcacagcttttatacattgcacagaagtttttaaacaaagcgtttacgcccagggattgtcaggtatttgcctatctttatgacactctcggtatgaatatcggcttgttagagtatctggcagaatactgtgcccagaatggccatacatcggtgcgctatctggaaacagtagccttaaactggcatgaaaaaggaatacgcacagccgaagaagcccaggaatacagtactgcgtatacaaaagacgcttttgcggtcatgaaagcttttggtttaaacagccgcaaaccggcagtcccagagcagaagatcatggaaaaatggtttaaggattatggctttgaccgtgaactggtcttagaagcatgcagtcgtaccattaatgcgatccataccccaagttttcagtatgcagactccattcttacagactggaagaaagcgggcgtgaaaaccttagcagatgtaaagggaatggatgcccgcagggcggaacgtgcccaaaatggtgctgttaagcggcttcagagttatggaaacggggcagcagcacaaaataacagaaaaacttcccaaaatcagtttcacaattttaaacagagggatacagattatgacgccctgatgcttcagaatgtgaaagaatggatggacagtccggaataataaggagacagacttatggcattgagcaattctcagtatgacgccattatgagagaatatggaaaacagcagatggaaaaccagcacagtcaggaagcgcggaaaaaagagatctatcaaaaagttccggctgtaaaggaattagaggcagagatcgcggagcggtccgttgcctgtgccagaaaacttttagagggaaatcaggaagcaatctacgaacttcgggaaaagctggcagatctgaaggaacagaaggcccttcttatcaaggcagctggttattcggatgattatttagaactccattaccgctgtaaagactgcagggataccggctgggtggatggccacaagtgccattgctttttgcgggcccagatgaaactgctttatgcccagtctaatctggaacgtgtgctggaacaggaaaattttgatcatcttacatttcagtattatgataacagccagatcattccggagattggtatgaccaatgcagattatatgcgccgggtggtaaaaagctgtatggaatttgcacagaattttgacagtcaccaggacaacctgctttttacaggaagcacaggagtgggaaaaacatttctcaccaactgcattgccagaaagctgatggatacctatcattccgtgatctatttttctgccagtgatctctttgaagtgttttcaagaaacaaatttgattatgatcaggcagaagagatgaaggacacttaccggtatatcctggattgtgaccttctgatcattgatgatctgggaaccgaattaaacaacagttttacttcctcccagttattttactgcatcaatgagagaatgaatatgaaccgttccactatcatttccaccaatctttccctgacccagctgcgtgactcctatacggaccgtgtgacttcccgtatcatgcgttaccgtattatccctctttacggcagggatatccgtctgttaaaaagataacccttaagatatcttgacggatacaaacgaaaaatggtataaagatatatgctggcattcgtatgagataacaaggcaatgccggttaaaacaggaggataaatatcatgttatatgaggaaaaaatcattgaaacaattccggtaggtcctttaggtcttattcctttaaagagctgcacaggtcttggaaaaaaggtggacgattatctggtagagtggagaagagagagagaaagcgaacataagtcaactatcgcattttccggatatcagagagattcctatattctggaagcaaacacaccaaggtttggttccggtgaaggaaaaggaacaattgaagaatctgtcagaggtgatgacctctatattatggtagatgtatgtaattacagtctgacctattcactgtttggaatgacaaatcatatgtctccagatgatcatttccaggatctgaagagaattatcgctgcagcagcaggcaaggcacgcagaattaacgttatcatgccattcctgtatgaaagccgtcagcataagcgttccggaagagagtccttagactgtgcaatggctcttcaggaacttgtaaatatgggtgttgaaaacatcattactttcgatgcacatgacccaagagtacagaattcaattccgttaaagggatttgagactgtacagccgatctatcagttcttaaagcatctgttaaagaatgagccggatctgcagatcgacagcgaccacatgatggtcatcagcccggatgaaggcggtaccagccgtgccatctacttcgcaaatatgctgggactggatatgggtatgttctataagcgccgtgattacaccaagatcgtaaacggcagaaacccgatcgttgctcatgagttcttaggttccagcgtagaaggaaaagacgtactgatcattgatgatatgatctcttccggcgagagcatgttagatgttgcaaaggaattaaagcgcagaaaagcaagaaaagtatttatctgtgctactttcggtctgttcaccggcggacttgcaaagtttgaccagtattatcaggatggtctcattgaccgtatccttactaccaacctggtataccagacaccagatctgttaagcagaccatactatattgatgtagatatgagcaagtacattgcccttatcattgataacctgaaccatgacgcatccttaagcgatctgctgacacctaccaagaggatcaacaagcttcttgaaagatataaagagcagcaggcagctaaaaacagcgaaaataatgcttaaccaggagcgctgatccagttatataacatataagtttacaggggctgtgacaaaatagcaggaaacaagctgttttgcatggccccttttggcagaaagttggaaaaaaagatatgagggaaaaatggtttcgggaacatatctggtggatgagttttatcctcagcctgatggtggtatgggtccattctgaaaatacagagttgtttttaggggaattaggaagggaaacaatggtttacagcttggagaattttttcgcccagactttggggcagattgcagttcctggcttttttatgatctctgcttatcttttttatagaaattttcagttttcaaaaacagtttccaaatggaagagccggtgcaaaagccttcttcttccttatgttttgtggaatattctttattatctgggttacgttgtagtcacaaggctttcttttgtgaaaaatatcattggaaaagagccggttgcttttggtttaaaagaactgtttcaggcggtagcatattataaatataatcccgtgttctggtatctgttccagctgctgcttttagtggttctggcgccttttctgtactggatcatctgccggaaatggagcggtctgttatggttgctccttcttataactgctctgtggaaaaatgtaagtttacccatcttaaatctggatgctctgttctactacagtgcagccgggtatgctgtgcttttttctgaaaaggtggaaggagaaaatacatcttccgggaaaaaaatctggtttgccattcttattctttgctggcttaccctatggtttcttggaagacctggagcaactttacattttacaccggtccatactgttctgacccgtttactgggagtgcttattttctacagtattttaaaagaaatacccttcagaccagccacttctacagtaaaaaacagctttttcctttatgccatccattttccatgggcccgtttctttaacaaagccggagctgtactttttaaaggaaatcagggggctgcagcagtatttttcctgactatgccttttctgatccttggtataagcaaggtcctgggagagctgttaaaacatacagttcccggaatttatgaaattctttccggcggccgcggacagtaaaatgcctgatattgtgcattgatgataaattttttatataagaaagatgaaaggttgtactttttttatgaatatgttaaaatcagtataagatgtattataacaactatgttcttgttacaaggacagaaatgagggaatgatatggctattaataaagaatattctactccattgtatcagcagcttgtggattcagtaaaagcacagatcagagatggcattttaaaagaagatgaccgtttgggctcagagcaggatatcagcagggaatataatgtcagccgtatcacggtgcgcaaagcattcgagatcttggcagacgaaggctatgtaacaaaacgtcagggaatcggaactttcgtttcagccaggaaattaaataattttaacgaagggcagatgagaggatttacagaaatgtgtattaaggatggtaaggtaccgtcttcagaattgatatctgcaggatgggtcagtaatttgccgtctatcagccatcaccttcatgtcccagaggaagaaccgattttaagagtgcttcgtgtacgcaaatgtgatggggtacctgtgatggtggaagatggttattttccgaaacgtttttcttatttgatgagcgaagatctttgtggttctacgtttgaaatattccgtcgacacgggacggaaccaagccattttagtaaaattatggatatttgctatgctacaaagttcgaggcacaaaagctggaagtgcgtgaacgtcaggcattgattttacagaaagatatggcatttgatcaaaatggggatgcgattcattatacaaagttggtaatcaatccggaacggtataaattaacaattataatgtgatctttataaaataaaaataaaggtgaatttagtaaagtaaaatgaatagatatcgtaagttacaaaattgataactttacggtatctttttttataccttgacactgcaaaatgcacaaaaaataataattaaataccacaaaaatcacaaaaatgtaaaaacgctattgccaaacattatataacgttatataatgacatcaagctgatacgagatgtatctagaacagaaacaagatgttataaaaaagaaagtgagggtaatatggtaaaatttgcagcagcaggttatgtatgcgttgattattatccggattttaacaatcgttattacataacgggtaatggggtagatgtgctgttcaatctgctggacataaaaaaaggaaaagatatggaagcatccattatttccgctgtatctgatgatgaatacggaaaagaagcggtaaaaatgtttcacgaaagaaatatcgattgctctcatctggaagtaataccaggaggtatgacaccaagagtacctttacatttggtggacaatgaccgggtacacggaactcctgtacgggggattatgaaagattatgagttttcaaaagaaactctggaatatatctgccgccatgatatgatgcacagtgattttacgggacgtttaaatcacaggttgggagatatacgaaaaagtggtacaaaagtattttttgatcttgggaataatctgaaacatcctgatttggaagaggtgattcaaaatattgactgtggtctggtatcttttgggaatgactttgaagaaggaaaagcatttcttaagtatgcacattcaaaaggtgtaaaactaatgatcgctacatttggaaagcttggttctattgcctatgacggttcaacattttataaaggcgagatcgttcccgtggaacatgttgtaaatacggtaggtgcaggtgattcttattttgcaggatttataagcggcataatagacggaaagagtatacaggaatgtatgagaagaggcgctgaacaatccgcaaaagtgatttctacatttaatccatatctgtaaaaaatatgaaaaggagtataaatttatgattattgatattcatgcccatcctgttctgcttgatgtaattaatgaagatccggaagatttgagctttcgtaagcagcaatttggagtattcaaatcaggacgtaatcctattgaatttgagaaacttttaattgatgatgcaaggattgataaagttgtatggcttccggaagactattccactcagatgggaagacccattgtcagcaatgaagagatggaaaagatcgtagcttcctgtccagaacgttttatcggatttgcaagtatagatccaagagatccaaaggcaaaagaaaaactggtatatgcttttgaaacacagaagctttccggacttaagttaaatctttcacgccttcacatgtatgcagacgatccgctgctggcaccgctttatgaagtttgtgaggagcataacaaaccaatcatgttccacgctggttacagttgggaaccggatactccttccaagtattcagaaccgatccgttttgaagatgtagcagtcaattatcctaaccttcgcttctgtctggctcacatgggatggccatggtgggaagagaccatcatgatgttgatgaaatatccaaatgtatatgcagatacttccatggtctatatggattcaccgagaaattattacagccatctgttttctgtcaatatgaatttaaactggcttcagaactgcttccaggataaggttatgtttggttccaacaatccacgtttccgccatgtaagaagtctggatggtatcctgaacctgccgcttcgtgaagatgtaaaaaaagctattcttggagaaaatgcaattcgctttttaggactggaggattaacatggtaaaactgtatgaaaacgaagttgtgacaaaacatgaatttgatatgatcaacatcacaaatgaagtgaaaaaagctgtagcagacagcggaatcaaaaacggaatggttgctgttatcaccaaacatacaactaccggaattatgatcaacgaagcacttccttgtgtagaaaaagatatagaaatgcagctggaacgcattgttccaaaagattttccttacgtacatacccatatgcttccaacttatggaacctgttcaggaaatgccccgggtcatttaaagtccatgctggtaggaaatcactgtattttcccggtgattgacgggaaaatgatgacgggcggagaacagaacatatattttgcggaactggatggtttacagatccgtcattatttcattgaggtaatgggggaatagcatttttgtaagtccagcggtgtgatgtcaagaaaataaatgatttaaaaatcatacatttttgatatataccgcaaagacaaaaaacacccacctaagccctgtc

SEQ ID NO: 3556 - DNA, 4981 bp, Unknown
  gut microbiota DNA sequence
atatataggaattcttggtggaattggtgtaggactttctgcaaaatatggctggcaggcagtatttaacacatttggtgctttggctattgctacagagagttatggactaaaaggagcagttggtcttagagtgattcagaatgtttttggcgttgtgtttgctttagcattttgtgttatattttattggtttatgtctaaaaaaaaggaaagtgaggtgaccgtacatgcagagtgaagtgaatcaggaagaaaatttgaatagaattattacggttcctaatcttctttctttttttcggctttgtctgattccggtaattatatggagttattgtgtaaagaaaaatcctctgttagctggtgaaatcttattgctgtctggtcttacggatcttgctgatggatatatcgcaaataatttttgcatggctggataaagacaatcgggttgctccgctaacggatgaacaattaaatccggtatggaaaatactaaattacgaaactgggaaatatgattcagtgcagaaacatttccgggtatttgaagcgtagaaggcttgagtcatccgttgtaaaagcaagaaaaaataatacatttgcggtcaatttgttatcgacagttgaccgcaagcacggtataatagacatagatctaataagaaaaccaaataatcattactgtaaaatatcaggtaatggtagtcatcatttataattggaagaaacaggttggctttaccctaatggtggaaaatccaccatttttccacccaaactgtaattcctcagatgaaaacaggttttcttatcttttctgaaattgacagaaaaagcagtaaaatcaaggctttgaatgactttgattgacatagaatgcaagctgttttctgtactaggatgaactcctaagcactagttgagggttcgattccccctgggaacgtgcattttttgcagcaatgatcgtaaaagctcattgctgctttttcttttttccggtactcgtgagcaccgagagaacacttaaacgcaaatatcgagcaccgaaatttcttaacgggtaccaatgcaataattcaatcctggtaccgaacggagataactacagcgtagaggagacttttgataaggtaatggtgtcattctttcaacctcctctatggtgaatatttctggacaaccaagtggatttgcttatcctgcatcaaaatttgcagtaaacgggtagacggtatggcaagaagctaagacaatgtagtatggtgatatcatcacggaaaagagaggagattgcaaatgaacgtgcggatatcaaagttggaaagatcaatgtggatgagcagcatgaactggcaagtgaatttggtattatgagtatcccgactttggtggtgatgaagaatggaaagattgttcaacaggtttcgggtgcgagacccaaggaggccattctaacaatgatttaaggagatatgtttatgggtctttttgatttttttaaacaggaagatatcaatcaagggatagaggaatatggttcgactgccggtgcaattctgttggacgttcgtatcccgcaggaatatcaggaagggcatataccagaaagtaaaaatataccgttacagcaacttaacaatattgtatctgtggtgaaaaataaagatatcccattatttgtatattgttattcaggagtccggagccgtcaggcaactggtatgctacagcacatggaatatatgaaagtaaagaatatcggcggcattgctgcttatacaggaaaggtagaaaaataagatgaaggtagtaatcgtaggcggtgtagccggaggagctacagccgcagcaagaatacgcagactggatgaacatgcagaaattactgtgtttgaaagatccggatacatatcctatgcgaattgtaggcttccatattatattggagacgtgatcatagatccggaagaacttaccctacagacaccagagagcttttttaaacgtttccatatcaatatgaagatacatcatgaagttatttccatacatccggaccgtaaaacggtttcggtgaaaaatttggagaacggtgagatatttgaagaaaactatgataagctgatcctctctccaggtgcaaagccaacacagccgagacttcctggagtaggcattgataaactttttacacttcgtactgtagaagatacttttcggataaaggaatatataaataagaatcatccaaaatctgctttattggcaggtggtggctttattggtctggaactggcagaaaatttgagggagcttggcatggatgttacaattgtccaacggcctaagcagctgatgaatccttttgatccggatatggcatccatgatccataatgaaatgagaaagcatgggataaaagcgctaaaacaaaattaggcaaacataagccggatctttggattgttaccaaagatatgacgagacaaccgaatcagccatggtgtgctgacaggacaacacctgtaattttaatcacgggcaatcctgatgttgttgaaattaaaaaggatcctgggaaactaactgttctttctatgccattatcgatagttaatttgcggaaaaccgtcaaaatatatgtgccgtgaggagaagtttatgctgtatataacactattatttgcattccgtgttccgtggggatggacatacactgcaggaacagtagctgattagatggcacagtttagttttggattttatagtttgatgcttacatctctgttgttaggcttgatcgtaatggtgttatataagccacgaacctggtgtacattttgtccaatgggaacaatgacgcaagagatctgtaaatttaaaaataatgaaaataagtaatacgattagctgatttgtaaaaggcatatgtcaaaaatattattgacatatgccttttatagagctaatatataggaaatgagagaaaggagcagtttatgccgagaccagtaaaatgcagaaaagtctgccatttcccgaatgttttagagtttcttccggcagatggtactgagaaaagcacaccgattgttttgaccgtggatgagtatgaaaccatccgtcttttggacaagaaaggttatagtcaggagcagtgtgcagcatctatgcaagtcgcaagaacaacggttcaacggatttacgagattgctaggaagaaaatagcagatgctctcattgatggacatccgctcagaattgaaggtggagatttcagaatctgtgatggtcagagcagtaactgcagccttggaggatgttacaagcaggagatttaccaaaaatatgcagcggaaaaaggagaaggtatcatgagaatagcagtaacatatgaaaacggacagatttttcagcattttggacacacagagacatttaagatctacgatgtagaggaaggaaaagtggtacattcagaagtagtagatacgaatggaagcggacatggtgcattggcagaagttcttaatgcattaaatgtcgatgttttgatctgcggcggaatcggaggaggtgctcagaccgcgttagcggcagcaggtattaagttttatggcggagtttccggtgatgcagatcaggcggtggaagcatttattaatgaaacacttgattataatccagatgtgaggtgttctcaccatgagcacagtcacggggaaggacatacatgtggagaacatggctgtggaagccatagctgtcattaagaagaacagcaaaaaataacaatacgaaaggatgcgtcaaggtaatgaaagaattatcgtgatacatccttttgtgttatttgataagatggcagattacattttcaatacggcagttaaaacctgtgaatgttgcatcgatctctacatggattgagtatttttcttttcttgcttgtagaaagtgatgaacggaaggtataatattgttaacgatccagagatatttacattggaaatagcttaatcaatttggaggtatatcatgaaagcacataaatattggtcagtcggtgcgttaattactatgattggaactttttataccggatataaaggatctaaatcaagtcataggtattttgcgtgtagcgctcttatatgtatgattatgtccatgtacactggacataaaatgatttcaggtaataagagaacgagaaaacaggtgaaaaagacagaagcggaggaatcataaatgttagagttaggaaccaaagcaccggcttttgaattgccggatcaaaacggagaaatgcatagattaagtgattatttaggtaaaaaggtaattttatatttttatccaaaggataacacggcaggctgtacaaagcaggcatgtggtttttccgagcgttatcctcaattcactgagaaaggagcagttgttcttggggtaagtaaggattctgtagcctctcacaagagatttgaggaaaaatatggattggcatttacacttttggcagatccggagcgcaaggtgatcgaagcgtatgatgtatggaaagaaaagaaaaactatggaaaagtctctatgggcgtggtaagaaccacatatcttattgatgagcagggagttatcatcaaagccaatgataaagtcaaggcggcagatgatcctgaaaacatgctcaaggaactgtcataatgaagattattttatcacctgcaaaaaagatgattgtagatacagataacatagcaccggttgaactgcctgtctttattgataagacagaggagatattgagctggatgaaaagtaaatcaaaagaggaactgcaaactatctggaaatgtaatgacaagattgcggagcagaactttaacagattggaaaatatggatctttataacaggcttactccggctgttttagcatatgaagggattgcatttcaatatatggcacc

SEQ ID NO: 3557 - DNA, 57459 bp, Unknown
  gut microbiota DNA sequence
attttctcaaaaatccaaaggtctaaaccagaccttttattttctgaattttcagggttttacatactgtttaatcttcaattatcaaggatctcattacgttgtcagacttgtttgctgcaacggttatttattataaccggttgtttttcatttgtcaacaacttttttaatttatttttccgtttcatctgaaacgattgctgctctctcaagcgcgaagattataatagcaaacctcaaaccgtttgtcaacaacttttttattattttgtatcatttttttggttctacagtattgtataaattatatatacaattaatacattatcacaaaacccgcagaaacaagatttctcctgctcctgcaggtcaaatgcttctaatttatcttacaataccggagtccatgccatttcataaatgccatccacatcatctgttgctgtgatcaggccaaggcgtacatatttctcaataactttctttaaagagtctcccgtaaattcatctgataaaccaaactgtaatgcattattgatcataacattcatgtcataatcgccaccattccagccacggtcaagaagcagctgtgttgcatcttccggattttcatgcatccaggaatgtgctttctgaacagcctgggtgatctttttcgcaatcactggattttcctgtacaaatgtacggttcatagcaataacacagcagctgtcttttgcaaaatcttcatcctgtaaggaacggacgcattttaacttgccctctttcatcattgcataggcaaaggtatcacttaaaagagcggcggagatctcgccacgttccatagctgcgatacatgcgtcagaagaaacctgagtcagggttacatcctttaaaggatcgatcccatctgcatctaataataaagaagtgatgttgtaatcagatgctcctattccatttggtacagagatctgagtccctttcagatcttcagtggtgttatattcgctgtctgccagtgcataaagagacttacagccaatatgcgcgccgccgacaaaggtaatatctacactgttggtgatcggtaccagcatggtagcaatatgtcctactgccacggtagcctgctgtgttcccaatgcttctatataagaagttcctttaaaaccttctgcagtcagcccagcttcttcataatatcctttatcatctgctacggtaggtcctgaagtacagccatcagacatataatataatacaggctttccataagctggctctttctccatagctgctttctcttcttctgttggagtcagatcaaaatcctccatatcaacaaaacgtccgggaatatctaccggagtaaacagtgcttcccatttgcctgccgcaaaagcttctgatgcattcatatgaacatctgatacatttacttctacttccacgccatcctggcccatttcgatctgtccatcattgttcagatctcctgccagctgttccttttcggttgcttttgttgcctctgcctgttttcccccacaagctgtcatagacattcctactgaaagtgccagcattgctgcaagtgttcttttcgttctcataataccttctccttaataaatgatgttatatatttctccccgcaaaatgaagctggttcaaaatcatatttctgtatctgataaatctctccgaagagcggtctcttggaaattcttcttctattttaatatctgcaatgatccttcccggatttgcgtccattacaataacccttgttcccatataaatggcttcatctacatcatgtgtcaccatcaacgccagctgcctgtgttctctccacatagaaaggatctcgtcctgcatattcatgcgtgtaaatgcatcaagagcccccagcggttcatctaacaataagatctccggctgactgatcagtgtccggaccagtgccactctctgagccattcctcctgaaagttgtcccggataatcgtcccggaaaccttccagtccgatcacatgaagcatatgctccactttttcttttccatttgcatcgtttaaccttccctgcatttttaaaggaaaagcaatgttcttctccactgtaagccatggaaataaggtaggtttctgaaaaaccattcctctctcaggggatggacctgtgatctctttttcatttactgttacttttcctaatgtaggctggatcagaccggccaccaaccgcaggatcgtggattttccacaacctgaaggtcccaccagactgatgaactccccacttctcatttcaagatcaatacagtcaagagcatgggtgacttcatcattttctacctttgcaaagcttttggaaatattttccagttttaataatattttgttgttctcatccataattcttcactgctccgttctgccacctgagcacatggcatttcacgcggtctaatatttttgttacaactgtaaaaataaagcagatcacaaacagagccgcaaacattttgtcataacttgcccaggatttgctccagttcatataccatccaagtcctgattttacgccgagcatctctgcgatcataatagctgtacaggaactgctcatagcctgggtacatccctgtaaaatagaaggcatggcgtgaggcaacgcaacctgaaaaacaagctgttgctcactggcacctaaggtacgggctgcttcaaaataatctctgtctacatttgcgatccctgtcatagacgcaacggttaccgcaaaccaggagccaagggcaatgataaataccgctcctccaaataaagaagatgctatgaccatcatgatcgggatccaggtagacgtagggatcggacctaaaaatttgatcaccggatctacccagtaacgggctttttctgaatagccgcaggtaatacctgttaccagtcccaggctcacacctgcaaaatatcccaaaaataaaagtcccagcgtatggatggtacaatccagtatcatggcccggtctgtccatgctgcgtttaatataaagttcatacacggtacaaaaggctgggtaagaactcctgttttcagggtcagataatcataacctgcaaacaataaaaacagcgctgaccataagggcgcacggtaacgaaatttctcatacaaccgcttatctcccttacaatgcaaaatagcggcagctatgccgtatccattataaagaaccatcatcaggatcaaaaatcccaggtatgtatacggatttcggttcatactattgtccggtatcagcatatactccaaaattgctgtcactgcgcaaatttccggaaggaccaatattaatttctcgatcagccgttcctttcccgtcttttcttttgtctccaattcatgcagttcttgacgggtcaggctgaccttcttttgcagatctatatttatactctcccccatagtttccccctgtaaataatcttcgcatctcttgctgtgtgttattattttatcgagcggaagggaatttgtccaatcgctttccttcaaaaattttactcatttattgatatcatctataaatcctttaaaaccgcagaaataagaactgcaaacgatactatatctatgctaccaaaaatttttagattgttaaaaattattgcaaacattttgtattttttatagtgcattttttacaattctatgttatacttattaatgacatttattatcattaaacaaaatatgtgttcacaggatttcaggcatggttttgcagcaatatctgtaatgacagatgcctgatcagatgaacatacaataaaaattcaggaggattcatatgagcagattggagttgttcaccccaagtaaagaccagctgatggttgagagtctttacaaaaatctggagcagcgtatcgtggcaagccctccaggtatctgccctgttgacataacaagggcctttattgaaatgtgccatgcacagacctgtggaaaatgtgttccctgccgtgtaggtcttcaccagttaaagcacatgatcaccaatgtattaaatggtgatgctgactacgagatactggacctgatcgaggaaacttccctttccattatgcagaccgcagactgtgccatcggctctgaagctgcaaaaatggtatggcgtatggtacatacctgccgtgatgattttgaggcacatatccgcaacaaacgatgcagctgcgctatttcccagccggttccctgcgtagccctctgtccggcccatgtggacattccaggttatattgccctggtaagagaaggccgctatgcagacgccatccagctgatccgcaaggacaacccattcccttctacctgcggtttcatctgcgaacatccatgtgaggcacgctgccgccgtaatatggtagatacctctgtaaatatccgtggattaaagcgtgctgctgctgaccttgcaggaaaagtagcacctccgccatgtggtccttccacaggcaagaagatcgctgttgtaggcggcggaccttccggtctctcttctgcttattatctgcagttaatgggccatcaggtcactgtttatgagatgctgccaaaactaggcggtatgctgcgctacggtattccaaactaccgtctgccaaaagaccgtctggaagaagatacagatgcgatcctggaaaccggtatccaggtacattacaatgtaaagatcggtgaagatattaaactggacgaactgagaaaagtatatgatgcagtgcttattacagtaggtgcttctacagataagaaactgggacttcctaatgaagatgcagaaggcatcacctctgctgttggtttccttagaaatgtaagtctcggggactgcccggatcttaccggacaggaagtcgctgttattggtggcggaaacgtatccatggacgctgtccgcactgccatccgtctgggtgcaaagaaagtcagcatcgtataccgccgtcgtgtagctgatatgacagctctcccggctgagatcgaggcagctgtcgctgaaggtgtggaactgcttactttagttgctcctgccggtattgaagtagatgaaaatggacatgtatccggtgtccgtgttaccccgcagatgatcagcaccatcaaagacggccgcgcaagcgtaattgccagcggcgaaccggagtatgtgatcccatgtcagaccatgatcgttgctatcggacagaatatcgagacaaagcactatgaagagtctggcattcctgtatcccgcggaaagattgttactcttccaaacggcggatttgcagatattcctggtgtatttgcaggtggtgactgtgcttccggtcctgctactgttatcaaagctgtagctgctgccaaggtaactgctgctaatattgatgaatatttaggctatcatcacgaaatcacctgtaatgtagagatcccgctgccaaataacgctgaccacacaccttgcggtcgtgtagagctgtctgaacgggaagcaagtgaacgaaaacatgattttgaaggtgttgaaaactgcatgaacaaaaaagaaattgcgcaggaatccggacgctgcctccgctgcgatcatttcggctttggaatcttcaaaggagggcgtgagaaattatggtaaatttaacgatcgacagactgcctgtatctgtaaaagaaggaactaccctgatggaagctgccgaatctatcggcatccatatcccacacttatgctactggaaaggtttaaacgagatcgctgcctgccgcgtatgtgttattgaactggaaggacgtgaccacctgatcaccgcctgcaacacaaaggtagaagaaggtatggtcatttacaccaacagtccaaaagtgcgcttagaccgccgtcttaccgttcagctgatcttatcccagcatgactgccggtgcgctacctgtgtaagaagcggtaactgttctcttcagaagatcgcaacagatctgaatgtccaggacggtctttttgaggaacgtctggaaaaacagccatgggataaaactttcccactgatccgtcagtctgaaaaatgtattaaatgtatgcgctgcgttcaggtctgtgacaagatccagagcttgaatatctgggatctggaaggtaccggttcccgttctaccattaatgtaaccggaaaccgcacgatcaatgaagcggactgttctctctgcggccagtgtatcacccactgtccagttggcgcccttcatgagcgtgacgatacggaaaaactgtggagagctttagcggatcctaacaagaccgtcgttgtacaggttgctcctgctgtccgtgctgcatggggtgaagaccttggatttacaaggaaagaagctactattggaaagatctttgacgctttaaagaaaatgggcgctgattatgtatttgactcctgctttactgctgaccttaccattatggaagaggcaaatgagctgttagtgcgccttggcaagggagaactaaaggaccgtcctatgttcacctcctgctgtcctggctgggtacgctttgtaaagagcgagttcccgcagtttgtaaagcagttatctactgccaagtctccgatgcagatgtttggcgctgtcatgaagagctattttgcagagcagattggcaaaaagccggaagatatcttctccgttgccattatgccttgtctggctaaaaagggcgaagtaaatatggaactgttctacaaggaatatgcaggccatgatacagactgcgtcatcactacccgcgagctgatccgtatgatcaaaggttccagcatcattactgaccgtctcactgatattgaaccggaccgtatcttccacgacgcttccggtgccggtgtgatctttggagctacaggcggtgttatggaagcagctcttcgtactgcttactatgccatcatgggtgaaaactgcgcacctgatgcctttaaaaatgtacgtgcttcctctcaggagaccggcgttacagaagcagaatttgaattaaatggacagatcctgcgtattgctgctgtcagcggccttggaaataccagaaatctgttaaaagccattgaacgtggtgaaaagcattacgaatttgtagaagtcatggcatgcccgggcggctgcgttggcggaggcggacagcctcagcatgacggtatggaaatggcctttgagcgtggaaagaacctgtatttcctggatgagaatgctgatatccgccgttcccatgaaaatccggatgtaaaggctctttatgacaactactttgaacagccattaagccataagtcccatatgctgctgcatactgaccataacaagtggcagatgccgccaagtcctcagagaaaccgcaatggatatgttattaatcccaatgcgaaattacagggataagatgtgagatctgacccccttttgggggatttgcgaaaatcataaaaacaaaaaatcttccggtgttggaatttttccataccggaagattttttatatcattttttcgttacatgataaatcctgcgatcacgtatagtacaaaactgatcactgcaatactgcacacataagggaactgggtctttatatggtctatgatatcgcagcccgtagtggaacaggtcataatggtggtatcggagataggtgatgcgtggtcaccgaagatacttccaccaaacatagctcctgctactaacggaatgctgttgcccatggaatatgccataggaagtgcaataactgccataatagccatagttcccatagaagttcctgttgcaaaggagatcaggactgcgatcaggaaggtcaaggcaggaagaagagccgggcttaagaactgctgaaaaatactggaaagataagtacctgtatccagagacttaactacattacccatggtaaatccaaacagaagaacaaaggtaataggaagcatgccgctcatgcccttgaagatctcgtcaattacctggctgacggtaaatactttttctgctacgcaaagaacagatgctactaataaggctatgataactgcccagatcagagccttcataccagaaccgttcatcaggtttccattaccagtaatgatcagtgctgcaaacataactgcgatcagagtacctaccggaagaagcaggttgatggctcttggagtgaaaccagatactgctttagaagtatcggagtccgcctttttgtggatcggatcatccagttcgccggttgttgctgctctggcttctgccttcgccattggtccaaagtctttctgtgttaatgccagtaccagaaccagaaggatcgccaggatacagtagaagttcataaacagggactggaacagaacggatacagactgatcttccggtacaccaccggttaccagataacctgccatagctgccagccagccgctgaatgggaataatacacaccatggtgtggaagtggtatgtacgataaaagctgctttctcatgaggtacttttaaagcgtcatttacaggtcttgcaacagaacctgttaccatacagcttaaggtcccggaagtaaataccaccagacctaacagccaggtgaaaaggttcgcccctcttttagacttgatgaacccctgtttctttacaacaacatttacgaagccctcaataccgccggacttctctgccagatggatcactgctgctgtgatcagtacagagccgatgatcagggtgttgctctctgtcatggtatccaggatgctgtaaatacctgcatttaagcctgtaaatactgcaaaatggttcaataccaagtttcctgtaaggataccgatcaaaagtgagataaatacgtttttcgttgtcagtgccagcgcaatggtaaggactggcggcacaagtgaccatacaccaaattccatactgttttcccctttcacttttcctttttgtattatgtacttttgtattttcagtcgcctttttcagacgtttctgaccatatttttaaaaatcttatgacactttctatcatactttttatgacagctttctcagtgcagttcccagatctccctttacgatcttgcagtcttttgctgccacttcaccaccgatcagcacatagtcaatacctgttggtgggatcataggatcgtcaaagtttgctccgtcctggatcttttccatatcaaagataactacatctgcgtcagcgcctacatttaagcggcccttgttagaaagtcccagacgttttgcaggagctgctgtcattttttcaattccgtcatacagagaaatgtccccttttcttacaaactctgaaaggaatcttgggaaagtaccggctgctcttggatggccgtggccattgtcgatgaggccgtcgcttcctaccataacgccaggatctgcaaatgccattcggatgtcattttcatccattacatagcataccgtcaggcactccgggaagtcacggcgcatttccgcaaaggtctccggtgtacatctctgtcctttatactttccttctgtcaactggcatgcactgtaatcacagtgataacgctccagccagccatcatcataggtagttgcgccaattctggtggaaaatgcaaagtatggatagcagtcgcaggcaacatcaataccgttcatgcggtaaccatctacctggcgcagcagctgtttcatctgtccgaaaccggccatgctgccgatatgggatacctgcaccggaatgttgtataattttcctgcctctgccacttctgctactgctccaaacactctgtcctcgtcatctcttacatgagcggagatcattctgtgttccttttcacagcaggaagcagtatctaagaattcgtcacggcctgttcccggaacatagcgaagtccgtaggaaattcccacacagcctgcttcaagggctttttcaaggccttttttcatatgttcctgctgctcttttgtaacaggtgcatatttatccagggcgcctgctgcctctctgaaatactgatggcctgcaaaaagcattacattcactggtgcgccgtctttttctaccatatccagatatttcaccggatcatacacattgataccgcagtttccgcctactgctgtggtaacgcccatacgcagcatggcatcaaagatacagaattcaatttttccgtcttttaccgggtcctcatgcatatgaatgtcgataaaaccaggagccactacttttcctgtggcatcaataaccctgtcagcctcaggttcttcttctgttacagccactacctttccgtcttccagtatcaggtttaaataagcctgtacctggttggccgaatcgatgagaaggccgtttttgatcagtgttttcacgaccttatccctccttttatctactcacaaatcccgcacttacgtgctctattgcctgcttacgcaggcgatttagtataacttacctaaaatctcatgctctgcaaacagggcagttgctccgccggtgtgccagaatactacattgcttccctgaggaactcttccgcttcttacatagtcgataagaccggccaatgcctttcctgtgtatacaggatccacaaacaggccttctgtgcgtgctaacaggcggatggcttcgctggctgcctcgtttggctgctcatagcctggtgcatagtagccggtatccatatgaaggtcttcttctatgtttacatgagccgggctctttatcagtgccagcacatcatttgccagtttttctactttgcgtaaatacttctcatccttagggcttacagtaatggagatgatctttgtatcgctttctgccatctttcttcctgctgccagaccggccatggtgccgcctgttcctgttgcgtggaagatgtaatctacattcaggttcatggcctttacctgtttttcaaactctacataaccatttgcaaaaccaacagaacctacaacacttgctccgcccattgggatatcatagcatggatggccggacttatttaattcctttgctcttgcagcgcccatttcaaaggaacgtgcttctgcgtcatcctctgtttctcccggaaggatgtctacaatatgaagctctacatccaggatcttgtctaacagcagatttgcccttacatccgcatcatccggctctactactgcagtcagataaaggataggtttgatcccgcatctgcggcaggctgctgctgtctccatagcatggttggactgggtagcgccgtaggtaatggcatactcacagccttttgcctttgcttctcctaaaaggtattccagtttgcggaccttatttcctccaaacaggttcattcccgtaaaatcatctctcttgataaacaggttgacgcctaattcttcagaaagacggtccagacggtaaaatggggtcgggaaaaatcccagctgttccttaggcagagcctgtaaaagtttttctgcctgttccagtatctgtgacatgattactctcctctccgcatttaccctcaaactcaataggtaaatgtttatttttctacaactatagcacttttgtgtatatttgtacataaaaaatgcagccacggcgcagatttcttacgatttctgtgtcatgtctgcatatattgttctttttctttccaagacagcctatcacccactgacgcaggtgaagaacacctgtgtgaagagcataaactgccattcccgtcggtacaggaaccagaccatcacattactccccatcatccagcagatacggtgtcatctgatatacatagaagttcagccagtttgtatacaatgtattggaagtatttctccatgtaagctccggtacagagaacggatcattatctacataataattgaccggaagtgaggggttcagtcccttattcagatctctgtgatattcgttatttaaagtcatgcggtcatattccgggtggccctggacgaagatctgctttccgtcacggctcattacaagaaatactcctgcctcttcggactctgccagaatgaccagctccggatgcttctcaatatcttccctgcgcacttctgtgtaacgggaatgaggtgccaggaacgtatcattaaaacttcgcactaacggtactttccggtctaataccctgtgattataaataccggacagtttttccgtcctcttatatttcgggataccatagtggtaatataagcccgcctgggcgccccagcagatatggatggtagatgttacatgggtcttggtccactccatgataccggaaagctcttcccagtagtttacctcttcaaattccatattttcaaccggtgcaccggtaatgatcattccatcgaattttttcttcttaatgctgtcaaaggaaacataaaacttgtttaaatgactggcagatgtgtttttggacacatgggtagacagcattaaaaaggtacagtccacctgcagcggtgtattggacagcgcacgaagcagctgtgtttctgtatcttcttttaaaggcatcaggtttaagatcaggatctccagtggtcggatatcctggctcatagccctgtcttcatccataataaatatattttctgattccaggatcgcccttgcaggcaggtccctctgtactttgatcggcatatcagccttcccccttttccttctcctgaagcaaattcaggaaatcttcttccgaaaggatcggaattcccagttctttcgcctttttgttcttggaagaactggactgtgtatcattgttgatcagataagtggtctttgaggtaacagaacccgttgcctttccacccttactctcgatcagtgcctgtaattcttttctgtttgcaaaatgctctacagaaccggtaataacaaaggtcattcctgcaaaggcagtaccattttcctcagtctgctctttttcaatatgcagctcctgtaataaatgatctaatacctcattgttcttttcagaagcaaaatagtctacccaggcctgagccagcacaccgccaataccatctacagctgtcagctcttccacgttgcaatgacgcatctgatccaggtcataattaaaatgacggcagagcattttggcatttgcaagaccgatcccggcgatccccagtccataaatcaatctcggaagtgtggtatgggaggccgtttcaatagaactgatcaggttatcataggatttctgaccaaagccttccatttctgtgatcacttctttatggccggataaatggaaaatatccgcatattcatggataaaaccggcaccaatgaatttctccagtgttgcctcggaaagaccatcaatatttaaagcatcacggcttacaaacaaggtaaagcttttgatcttctttgcctgacattctggattggtgcaatataaactctttacatcattggtctggcggatctccgtagcaccgccgcacaccggacagatcttagggatatcccttacgccgctgcgggtcaggttatctgcgatctgtgggatgatcatatttgccttgtatacagtgatcttatctcccacgcctaacttaagaccttccataatactgatattatggacactggcgcggctgacggtcgttccctctaactcaaccggctcaaatacagctaccgggttgatcagaccggttcttgaaggactccattcaatataagataatgtagtctcccggatctcatcctgccatttaaaggcaatggcatttcttgggaacttggctgtacgtcctaaagaatcaccataggcaatatcatcgtataacagaaccaaaccgtctgaagggatatcattgtgctcgatctgctctgcaaaccaggctactttatccggcagatcagctgccgttacctcttcatggtgtactacttcaaagccctgatttttcagccataaaaactgttcttttctggaatttttaaaatcaacgccttctgccttaacaagggcaaaggcctcaaaatgaacgctgcgctctgcggtgatcttgctgtttaactggcgcacagaaccgctgcaaagatttcgcggatttttatatttggcatctgcatctccgatttcttcattgatgcgctcaaaatccgtataggtaatgaccgcttcccctcggataatcagctgtcccttataggcaatagtcagagggatattggaaaatgcccttgcatttggagtgataacttccccgatctccccatttcctctggtaacagcctttgcaagtgttccattttcataagtaaggactacagtcagaccatccattttccaggacaaaaggcctttctggcttcctaaccactgctgtaagtcctctacactttttgtcttgtcaagagacagcattggctcttcgtgagtctcttttggaagctcgctaaggacctgataaccaacctgctgggtagggcttcctgacaggatgatccctgtttttgcctccagggcagacagctcatcatacagcttatcatattcaaagttgctcatgatctcccggctctcctgataataggcttttgcagcctgacggagctgggggatcagttctttcattctctggatctctgtttccatttattcacctgatcttcttttctagggtggaaagccacatatcgttttcctcttctgtctgcctcagacagacttgtggaaccttccaacagttttataagtcgtttgtattcttccccggtgaccttacgatattctcctgttttcaaaccgcctaactggatattcataatgcgcaccctgcgaagaagatgtacccggtatccgcaggcctggcacattcgccggatctgccggtttaagccctgggtcaggataatcgaaaaacgacgttctccctgtttgcggactttacagggcagagttttccgctctaattcctctaaccatacgccttctgacatttgtttgataaattcatcggtcagaaccttgtccacggttacgatatattccttttcatgggcattggtactgcgcatgatcttatttaccagatccccctggttcgtcataaggatcagtccctcagactctttatccaaacggccaatcgggtaaatacgctccggataagaaagcatttccacaatattttctgcccggtctttgtcagaagtggtgcagacgatccctcttggtttatttaccgcaagcagaacagggcggggaggttttacttctccccgcccgccgtctgtatctcctaccggctttccgtcgcatattactttctgtccatcttctacacgctgccccatctgggcaacttttccatcaattaaaactttgccctcttggatcagccggtctgcctcccgcctggaacacgctcccatgcggctgagccatttattcagacgttcttccatttaacttcctacgctttctttacaggctgtggatcatcagctatgaacatggcatctccgaaagagaaaaatctgtatttttccctgattgcctcattatacgctgctaaaatgttctctcttcctgctaatgcgcttactaacattaccagtgtagactccggtaaatggaagtttgtgatcagcgcatccaggatcttaaacttatatccagggtaaatgaagatatcggtccagcctgtttttgcctgtaaaatgccgtcttctgtggaagcagactctactgtacggcaactggtagttcctacacagatcacacggcctcctgctgcttttgtatcatttaccttttttgcctctgcctcttctactacataaaattcagagtgcatatggtggtctaaaacattttccacctttacagggcggaaagtgccaagacctacatgtaaggtaacgtgggcgatctttactcccatatcttcgatctgctttaacagttcttttgtaaaatgaagtcctgctgtaggcgctgctgcagaaccttcatggactgcataaacagtctgataacggttcttgtcttttaactggtgtgtaatgtatggaggcagaggcatctgacctaagcggtctaagatctcctcaaagataccttcataagagaactggatcagtctgtttccatcatctacagtctcaataaccgttcctgtaagaataccgtcaccaaagtcaataaccgttcccggctttgcctttttaccaggttttaccagagtctcccagatatcattttcacggcgttttaataaaaggacctcgatcttggctccggtgtccttttttacaccaaataatcttgcaggaataaccttggtatcattaatcacaaggcagtctcctggtcttaaatactctacaatatccttaaagatcctgtgctgggtctttcctgttttcttgtccagaactaaaagtctggaagaagaacggtcctccaaaggatcctgtgcgatcagttcctgtggcaggtcaaaataaaaatcttttacatccattttctattacttccttaatttataaattaattgttcacatgtaatctacgcaaatatgtctatgatctgtatgctcttactggatcgcaacagctgcgtcagaagactctcctgcagactccggcgcttctgtctgtgcttcctggctttcttctgctgaagtctcgcctgcagcgctgctttcatctgcattgccttcacctgcatcagaagaagcatctgctccatcaccgatcataacctggctgtctgcgccttcttctgaactgcttactactgcaccattgcttaaatccttgtaaataccggctaacagactgtcagactcaacggcctgttttaaacgctcattgacctgtgtagataaaaggcgcacatcctctgtctggttctggttggcaacgtaatctgcctcatctcctactacattttcgcggatgatataatcgccgttatcatttttcactacataacaccacataaggcccggtgccagcgtatctaccctgcggaactttacatcataggttacatatactacataagagtcatctgtcattcccgcctttgtatagcaggtaatatcctgataatcttcaatgtaaactgcttcatcttttaactgctgttttctttcttctaaacggtcatcttcctctttaccgaatactttgtaaagcagctgaacatcctggtctacttttgcctggaaataggtactgatcagctcattgacctgtggataagcatccttctgaagttcatatgcggaaaaatcctgatgatattcattattgtccggctctacagatccatcatccgtgccggtctctgtatcattttcaatggaaatatcagaagcatttgtgacttctgcagatgtactgcttccctgcgccttatcaccggccggttttctgtccataactaaaatgaccacaagtaataccagtacaatggctgcaggtatcgctaacattctggcatactttgttttatcatcaaaagcctttcctgactttctccttcctctgttactgtgtctcatgttctatcattcctccattatttgccactactccgctctattctaacaaaaagcaggctaaaatgcaatacagcgaaaatcggcggatacgtcaaaaaaactcccgtatcctaaggaataagcccttttttaccgaatacggaagtttttaagattacaggtcaattttattaacttaactttaagtctccttctttgacccagccgatcttctttaagaacatattgatgatcgggcagatcactgcaggaaggataatggatacaagaagcagtccagcccagtcacctgttgtaatagctgccttggttccctcagaaacgtctttgacccagcctgtatacacgccgatctgaccaaccagaccacaggtacccataccggaagaaacagcagctccgttcatttccatatggaagagacaggttgcgatcggtcctgtaatagcggaagtaacgatcggtgcgatccagatcttaggattttttacaatatttcccatctggagcatggatgtaccaattccctgggataccagaccgccccatttattctccgggaaagacataactgcaaaacctaccatttgggcacagcagcctgctactgctgctccgccagccagtcctgtaagacctaaagctgcgcagatggctgcggaagaaatcggaagtgtcagggcaatacctacaaatacagatactaaaatacccattaagaatggctgaagctctgttgcccacatgatcacatttcccaccttcatggctgcttttccaagagccggtgcaagaagtgcagataatgcgatacctacgccaatggtaacaagaggtgtaacaaggatatccacttttgtctctttggaaacagccttacctgcttctgatgccagaactgctacaaacagaactgccagaggaccacctgcgccgccaagtgcattggatgcaaaacctacggtgatcaaggaaaataatacaaggggcgggcagtgaagggcatagccaatcgctaccgccatagccgggccactcatggcagatgcaaggccgcctactgtataggctgtatcattgactgttgctactgtcatagtcagaaacggaatatgaagctgacttcccagtgtattgataatggttccgatcaaaagggaacagaacagtccctgcgccattgcaccaagagcatcaatgccataccgttttacactgatctcaatgtctttccggtgcagaaaatcttttaacttttccataatgcctccataacataatctgttttcttttcatcatttaacgtccccgcaattttaactctgtttttctgtattgtcaattacttttgtcatatgacaagacagttgactttacaaaaacagttcaaagcagtctgcacacttttacacataccaaaaagccaggagttaaactcctggctctctggtgtaatgcgaataggatttcattgtttgtctgccggaaagcctttcccgaacagcttgtatagattttagcatacttttcatataaatgcaactcatatttaacaaaacaaggccttatagggaatttttgtaacttttatgtaaaatttcaccctgcaaacatgactccatccagtacgctttcaagttcctccccatttattttctggggccagtcactgttatacatagatacctttccgtactgatccccatcataacgaaagatcacgtaactttcattatctgtcatgtaaaaatacagttttgttcccacaaggatcacttctgtttttccattttctcttccagaggcatctgtcttttttacagtcagtgccttttttactgtaaccactatttctgccgggcctaccacataaggatctctgctttctaaaagtccagagcttcctacatgataatgtctgctgccggaataggtactgaatgcgttcatagtcttttcaaggtaaagagcacctggatcattgtatgcagccacatcctcgctgttggtaaaaagactgttctcattataattatactcatatcgtatcagtgccggagttccctctacatatcccagatcatggatctgcccatttgtgatctcatatacattatccgtagtccagtcattttctgcatgggtcagaacatggagaaaatgtctgtctcctgatctcacataatatgcgtccagattgaaatagtacatatcgttgaaatcctggcttgcgacttcttcctctttattttggatctggatacgaagggcattgtttgcaaacccatctgctccgtagggataaacacttacatcaacaaatgtaccgtcattataaatatcagcactgtaatctgcataagctgcgatctttacagcataatctgcaggtgccgcctggtattcttcttttaccaggtccggatacttttcaaaaggaagactgatactgataagacctaaagcccaggaaccaatcgtataaggattataataaatattcagacggtctgtccccagactccaggcaacagcaccattgtcctgtggtgtattgatacattcaaaaaatacatctgcatcttcctcaggagtactgttctctaccagaccttcttcgctggcatacttgtcttttagttcgtgtacgatcccggatttcaccttatcttcatctgtgatcacatcataaaaacccagctttttcccggtttttgtatcaaaagtaagacctgtataggaattgtatccatgggctccgccgtaatagtcataataaaacagctcgtagcttaccacattttcatctgcgcgaaggatatcgggtgtatacacagctgacagctgcatattactatcctcctgtacatattcaaccatctcctctgccgatgttttcaggttttccagatcttcttctgcactcttttttaatgtgtcatactccaaagccagcgcctgattcagcttcggataagcagccgcttcctcatcgcttaacacaagtccccctgttttcagactgtaacttacctgaacgctgccatctgcactgtctgcatatccatttgcactgtctgtatggatatagggatgtaacatctgtggcataccgtcattcgttttttttgactctgcattttcttccgtctctggtccgctttctgactcttctgcaccactttcactttcatttacactttcttttgttgctgcatccgcttcctggctttcctttgacgttgtctctgctggttctccctttaaaattttctgacatccagttcctgtaaacgccatgataacagcaagtcctgctgccataattcttttctttttcatctttctcctctaaattgtaataaattttgaatgaacttctttttcaaattgatacttgaagttttagtgaaaatatagtattatacaagagatgcgtttgtagctcagtggatagagcagtggcctccggagccgcgtgcggaggttcgattcctctcagacgcatttttttattaccctttttcggtctttcccttgacaaatcctcccccatcccttattctgattacatatatttcaatatatcttctattatctgtcaatctgtaatctcatcataatttcattcattttattttttataattcttatttctattattttactccttattttatatcccggctactttatttttacaaatgattttgctatggatctgcctgggcagttttcataaatattatttttaggaggtatatcttttggtatacgacacatttctcaacacagtaaaagaacagatggaacaggctttaggagacggatattcccttaccttgcggaaagtccagaaaaataatggtcttatcctggacggtctgtgcattgcaaaaggtaacggcaccattgctccttccatttatctgaactcctgttatgaacagtatttaaacggaacttcaatggaggagatcatccagaagctgctcacagcctactacgaaagcagctggcctcccattcttaacaagctggtcctgtctgactatgactctctccgttcccacattgctttccgtctgatcaacgcttcttccaatcaatcccttttaaaaacaatgcctcatattccctggatggatcttgccattgtcttttatctgtacatacaggaaaatgaaaacggcatcatgaccgcagctatttctgatcaccatatgaaaacctggggtgttacagtccatgatctctaccacgactctcttttaaacactcccaggctttttcctcctgttatatccagcatggcctgtatcctggagtcccttgatcccaaacacctgcaacatcagccagctttcccggaaactcctttttatgttctcaccaaccagaatgggatcaatggcgctgcctgcatcctttacaaagatgttataaaaaattttgctgaagggatggaccgggatatcctgatccttccctccagcattcatgaagttcttctgcttcctgatgatgacccgctatcttatgatgagctggggcatctggtgactcatatcaaccagacagaagtagttgccgaagaccgtctttccaatcaggtctatctctattcccgtaaagaagacaggatcaccactgtttcttttggtccttctgctgtctgctgattcttactgtacccaggcaccggagccatctacatatcgtccgtcaggtgtccaggtatttgcatacataacaccattggaacccatatagtaccatctgccgcctactgcctgccagccggtagtcatctcaccactgccattcagataataccactggccgcctaactgctgccagccagtcttcattgcacccgttggatccagatagtaccatttaccgcctactgcctgccagccggtctgcatttcaccgcttccgttcatataataccactggcctcctacaagctgccagccggtagtcattacaccatcaccatttaagtaataccactgtctgtctactcttacccagccagtctgacgataaccggatgtattaaagtagtaccatgctccattgatctgcttccagccattggatggataaccgccgcttgaataggaataccaccagccaacattatcctggacccatctgccggttccattgtaaacgcctgcctcatcttcatctacataataggaagaagagtcatcagaccactcgcctgccttatcattataacttgcaatggctcttacacggaatgtataatctccttccttattaaaatagccattgaaattgaaggtcgttcctgtggtgtttacagtggtcactgtcttctcatctcttaaaagttttacatcatagctttttgcaccgtcaatggagtcccattctgcaataccgtcattccattccaggttggaagttccttccagttttccacctatgcgttttaactgggctgtcacttcaatgtagtcgccgctgtcgtagatctttgctttcttaaattctgcattacagccggacagtttaaaatggcttttactggtatacgagaagcgataaccgtcctttgcgtaaagttccacttttacttccggtatgtcacctactgtccaggtatcctggtcatctgcattggtatactcagcggactctacataatagctggatgtatcaccgcttacatggatcgaaccaatagagtctccgctggcaggtgccgtgtcataggaaaaagtcagtttcacagtgtcaattttagtatctgctgcaaatgcaggcatcacggacataaaggtcattgctgcagctaacgcgatacaccaggcttttttcatcttcatattccatcctccttcttatctattcattagataaattataacgtttttaacttacttttattataataaagagcatggatctatgcaatttcagaaaccttaaaaagaacttacgatttttgcaaaaattttacatggttacaaaattatacactcattttatctataaagtgtatctgtaagacgcagttcatcgatcatgtctgtaaaccagcggatctgtgtcgtaaatttttctctcagccggtctgcatctatactgcctttgcctgcttcaaaaaagtcgcagtcactttccaccgcaatatgaagttttccttcttttaaaaagctcatgtacagttttccgccgcttatctccgctgctgaaaggatatattctatcatatggggtgttaaaatgtgaaaaactttctccccatcatcagaacggaccgtaaaatgtttatcaaaaacctcattgcccgttttaatggtatctgtacggataagacgctggaaaccagtccttggaaacagactgacctgtgctgacagctccctgccaaggtcacagatcagccactgccccttaaaaacctcccgttttttattttcccagacctgcatttcttcattatatatattttcgtcctgacaaaggattatatcactgaattccatattcaagtctttataaaccgcttttatgtgatcatttccctctgcacagttatagtccagagggatcatcacaccggaaccctggatctgggtgatccctatctttccgaaaggctcatagatcacatcttccaatacctcctgaagggcttcttttaccagattttcacctatctgcttttttaggactgtatcctttttatcttttacagaaccaagtacacaggcaaggatgatcaacagaatggtcaaaaggatctggcctgttaccacgcatataaatgccaatactgccacgatttttcctatgagcctgcatacagcagccgttgtcttatttcctttcagttcccggttaagctcttcctctgttattttctgctgatccattttgcacctccctgctgatccttttttcttttactgtaccgtgccgcccattaactggatcagtgcaaggttttcgtcactggtaccgctgtagtttacaaatcccaacagttctgcacagtattttctggtttcaaaatcaggagaaataccgctgagcataaatgcgtcaataacagaatggccttcatatccctctaagaaatcactgagatcaatgtcatccgactccacatctacgctgtcttctgctgtaagatagcttgtaaggatatctaatgtgctgtctacatcttctgctgccgactcataaagataataggtggtatcatcttccgtcagctcaaagcagtagctgtcaccttcttctgacagatcccagcctaattcataggatacgccagtttcatcatcgatcaggttcaaatggtcataatcaagactccatatgccggaaatagactgtgtctggatctggccgttatcattgtagagaaggtcaaaatatgcctgatcatcttcaaaatagaagatcatagctgtttcatcaccggaaccgatccagtaagttccctgagctacatattcgatcacgctggctgtcgtcatcatctggtccaacgtagtttccaggttgcttccgtctccttcgctggataagacaatatcatctaactggatatattctccgttttctgtgttgtaccagtcaaaagcaaatgtagttggatcatcggaatagtcttcattgagatacagataaaaggtatcggtatctgctttccagtaaccatccagatctgtcacctctccatctgtatctaaaattgccagataggcatctttctcatcaaaggccgccaccatgatctcctgggtgctggaaattcccgcccaggtagttcctgccaggatatcggccatttctgagtcattaacaccagtaagtttctctgctgttgtttccgtttccgttgtttctgccactgttgtttctactgcttcttttttatcagctactacttttttggaagaaccacctccgcagccaacaagagaaatacacattgctgctgcaactgctactgccatttcttttttcatacgactcatcctctttctcattttttctccttcatttccatttcattaaaccgccttaaacgttctctggctgcttctaactgcgcctctatatctgtggacggctcctgttttttctcttttgctgccggtttcatggtcttatgctccgctgcttttcctgatatttggggatgttttcctgcaagcgttcccagcacacttcctgcagctgcgccgatcacagctcccgcagctgcggctccagctgttcctatatatgagccaaaatctggatccgaatcattttctgttcccaatgcatctggaactggctccgtggaaacaggctggtctgaagccccaatactttctgtggaagctgtaacaggcggtccggctgttgtctctgacctattggaagaaggcacacctgcggctgtatttcttgcacgttcacttacctgagagactgttgtactggtgcctctttctgtgtatacagcgggacggacccctgcgtctgccgccgcacctgccatcgccccggctcctcccgcaactaccgttacaaccaccggatttccataaaaatccctgtggtgggcgcggaactgattgcttcttgtcactgcttttttctgagctgtcctgtatttcgtcccggactgctctaaagcttttatcattacaagaagagttccctgccttgtttccagagaaacagctaactttgtaagagaagtgcgcacgccctcaagcatggcatctgtccccagggaagcatttacttttttgatctgctccaaagcaccatccaggctttttattgctttttcatactcctttttctgctgctccagggcatccaccttaacttttacgaaagccataggcgcctcctatttcaggttgatcttcagtttacctgcagaactggagatcttcttctcattggcactgtatacatctgcagcttccgacagggttaatgcataagtatttaccacattcaatacctcttcacatttcccgataatggcatcaaaacggctgtaaaactccgcagaaccgctgccggtccaggtggatcttaaattttttactgcagtcttactttctgaaagatagctgtacatgtttttgtagcctgttttaatgttgttggaatagttttttaactgtttgggatccactttaatatttgcgtctgccatttacgctcacctccctatttacccagatatttatgtaccagatccatggccttgttatctgcctgggtgtaactgttggaaaattctccgagagctgctcccatctgctgtaagatctgggtcagctgggccagatttgctttgtctgcctgatatcgttttaaatacgaagcacttgcttccccgctccatacagaagatactttttggatgttttcatctaacttattcatctcacttttcatttttgctgccagattggtgagattaactcctgtggatttaagttttgccgcatttacctgctgtgttgccataatacactccctcctatctcctgcttaccactgcctttgcctgcgcttctgctttttccatggaagaacatgcgtcccgcaggactgccgcgatctcccttaaagaagctgcaccagacgccaggtctgtattctgttcctgcataaatttcacaaagatctctgctgcttttcctgaccaggatgcagctactgcttcattggcggctgtgatcactttcacagtctggttctggatctgatcggccgcctcttccaacaactttgcctgttttttcacactctgagagtcaaaatgaatggctgccatttatctcatccctccaaacttaagcctgcctgcatttctgcttacagttttttctgtatcctcgtatacaccagccagttccttaaggactctttcataatttcccagcattgtgatgatcgcaccggaacttttccttaactgaccggccactgcgtaaatatcatctgcgctctcccctgcataagagtcctgcagtttgcgaaagatcgcataggtcgcatctgtattcgctgcaatggattttttgatagaagtgatttcctgcactgcccgcaaaagttcctctgtattgatccgactggttccatctcctgccatatgccacctccctgtaaagtctggtacagcatcagctctttgccgctgcacggatctggctgctgatctcctcttctgtctgctctaattcatcggcgatccccaggagtccttctgccacttctgtgtactgctctgccatttccaaaagagccgcccggtccttctggtaattttgcaaaaaacggtcttttacttcactgctccaggtgctgcttaaaccttcgatcacagatgtaaaacgctttaactcttttcttacatcccctgcagaagtttctacttttctggcagtggtccgcagcacttccggatccatttccattttattttctgccatgctctcctcctgttcctgttgatgtactcccgaactctttaccgcatctgtttttgcagttgagcttccatgaatacattctttgcaaccactgaacgtttttataccatgaccacccggctgccgtttttgatccctacttcccggaaggtttcgttatcctggatcagaccttctaactccaaagatccgaaaacaatattatccagtcctgcaaacaggtcgtgcccctctaactctgcgatctgctttttgatctgctccttggcagttcctattttcatccggtcgtctaacacaaattcataggttttggcatttcccggtatctcgatctccaaatggatcttactcatgttctccctcctttacaaaaggtgtcataaagaggactgctcttccttcctgccccgtaaatgcggctccagccggataagtcctgctcctctcagaaggtgtgatctcataatcaaaaataccctgctcatcaaaagctcccccaaggtggattccctgcttccagtctccaaactgacgaatcgccctgtaaccggccagttcttcatactctcttggagacagtgccataaagaaatgcagtctgtgattcattcctttttcaaatacagtttcaaggacttcacttacatcaaagtcttcactgtaaactgcttccataaattccgatgcgctgttgatcagaaggaccatgcgcttatagttctttaaagcctcttttaccgaagttttcgcctgtctcgcttcatacacaagttcattgcgctctcctaactggggcaaaagttcattttccataaaatgataaagttcttctttatctgtcatgtagccatccagatcattgtttctggaaaattcttccaattctcttaaacacccgtcaaagacataaacttctgcgccctttttcttcataagcagggccgtatattttagaaaattggtctttcctttttttcctgcaccacagacggtaaaacaaagggtcttatctaaatctgtggaaataagggatccatcctctgctcccattacaaagttctcttctgccagccctttaagatggatcatctccaaaaatgtatctgcattgatctcatctaactgcactcccagttttctcgctccctgggtaccttcttctgttaaagcctttaatttttcccggatcgccagcatcatgctttctccctgggaagcttttacaggaagagctgcctggaattccaaaggaacgccttcttttataagacctctgcctgtagtccggtcatccggaaggatctcggagcgcatcccgatcacactgtcatactcaaaccggtctgctaactgaagtccaataccctttgtgatattctgtaaaatacggcttcggatatcaccggaattgttgcaggtaaggatcaggtaaataccatagctggcaccttctctggaaagctggatcaaagtactctcatactgctcatagctgtctgaaaaggcgggataattgtcaatgactaaaaagatcgccggcacatcgctgtaactttcacgatagtctctgtaagagcccattcctttttgtgaaaatgacttctttcgactgtctaattcttcctctgcaaaacccatcatctgctggatcttctcatcatccccctccatacagatacagcctgtatggggaagtcctgcaaaggcagtcatggtacggctggaaaaatctgctatataaaagttcacctgttttgccgtataatgaagggccgcaccgtaaaaaatggtctgtaccagagatgtctttcctgaaccagctgaaccgcagatcagtaaatgaccatctcttataaaatcaagataaaccggaaactgcctctggttctgcggatcatctgccagaccaataggaagtttcatctgtttttcatcccaggtaagcttcatatcctccagataaagaagttttggaagcggcggcagccagatctgtctgagaggtttaatatgattttcctccgccagctttgccgcatactggaccatagcgtctaactgggtgaatttcttcacattatccccttttttcttctttttcttcttcactgcctccggctttcctgtcagccctatgatcatggcttttgccttgctgtcatcactaaatggaatttccggcgtgtaaggtgctccggaccagccggactggaattcatcaaagatctcatcatttccaacctgtaaaaagccccgtccggttccggtgatgtaagctgcatccgtgcgctttaacatttcattggagtcctgtttgtctgccacacgaagacagatacgaaatcttgtattgctccatatctcatcatctactacgccgcttggcttctgggttgcaaggatcagattaatacctaaagaacgacctacacgggctgcggaaaccagcgcccggacgaattccggctgttcttttttaagctccgcaaactcatcggcaatgatcagaaggtgaggcattggttcttctgcttccccatttctgtaaagttcaatataggcgtcaatgtgcttgatcttatattcgttgaaaatgcgctgtctacgcttgatctccgcgttaatggaaagaagggccctggtagtctggtttcctcccaggttggtgatcacacctgccagatgaggaagtccgataaagctttgggccatgccaccgcctttgtaatcgatgaggataaatgccacctcatgaggatgataatttaatacaaggcttaaaatataggtctgcagtgtttctgactttccgcttcctgtagtaccagccaccagaccgtggggaccatggtatttttcatggatatccagataaaccggctgttcccctgccttctgaccgatgagggaacgcatactttcatatgtgcggttttccagccacttatggtacatatccagatcttccaccctggaagtcttatacatatctaagaaggtaagcatatccgggatcgctgcattggatgcattttcccgtactttaaagttggaaagctgcctggaaaatacatccatttcggccaggctgacacggtcaaaggctactccttcccgttcttcaaatttagataacgtattgtaacaaccactgtaatccttttcccactgtacaatggtattgcaatgggacggaagcttatcaatggcatctgcactgaagatcacactaacccctgcattcttcggcggatctaaaagatacttggaaacaggttccccttcgatcatggaaatatcactgataaagactacataatgaggaaggactttttcctcttcttccttgtttttcctgttttcccctgcttctaaccgttctctgatcacatcagacaggtaatacatcacatcgcccatggctttggagtcgcagacaatcatgcgaagctttccgtccggtgtataagtgtggggaagccagcgggtatattccattttttcaaggtctctgcctggaaatacatagcacatgcgtacatccgtatatgggtggagggcagcaatctgcaaggctaaaatgcgcatcagctgatcccgtttttcctcatccccgcttactacacctaagaggcggtgatcataaagggaaactgccaccgaaacctggcgaagtatatcaaatttctccttcagttcttctatatggtcatttaaaggatcatgttcactgcccagatcttcttttgcatcctcaatctcattaggagaaggcatatcacctgctcctaaacggagagaaagaaaatcttcatgggtactgcttttttcccagagcctgcgggtattggaagtggtaaattccagaagttccccagaagaagggtattgctctgccagtacgagacggttatactccgttttatttttcaatttttcttctacacggaccatgtactctaaatatttgctgacccggctttcttctgactctttttcctcttttttgttgtaagcagaattaactaccgcccatatagccccgatcccggctgcacctaaggacatgcagatacttcctgcaccaaagccatcgctggtcatggctgctgctaaagcgatggggatgaccatggtaaaagaaggtcctatggtaaagatcaaaggctgtcgcttctgctgctgttttttagggcatttttcaatggaaatggtttcccggtccaaatttaaaagctttcgtggagtgcgcaggaaatatacatcttccacctctgtctcttctgatggttcatcttcaaaatgtgggatctctactgctttcaactcccggatcctgcactggttattgggattattgatggccagaagattattcagatatacgatcttaagacctactacgtaaataatatcaccgtaatgcagctttgttttctcccttaccagcctgccgtttaagaatgtgccatttacgctgtttttatcggttatgtaagcagctcctgactcaaaagtgatctctgcatggcttcctgttacaaagcggtttttgtatacaatattacaaagatcatcactgccgatctccagtttgaagatgctgccctctttcagcatatatttttcaaaatttacatgttctctctggacctgatcgatcttaacagaaaagtacaggtctgttttggtcaccattccctcgatcacggtaccatcttttagatccgcactttccaccggatctccctttaagatcagggaatactgtggggatcttcgcagtttccattgtccgtcccagacttctgcatttaataccagttcttcttttaaaccgcttacatagggacgtatggcaatggggaaattgcggttatctacattggggaaatagttttccgaaaagccattttcaaagaaaacggtcataagtaatgccatagatctccctcctttaataggtgttgtcaaggatacttgctgttacctcttccagcggctcctcataagaaggtttcatggtcccgtaaacagcaaccagatattctccttctaagggaagcatcattatggaagtggatgccatgacaccttcctcctggtctgtgatactgctgatatcaaaggagatatattcactgcagtaaaccgaccgtccggatcccgtagtcatcttatatacctgcttgtcattcataccgaaaacatattcttccattacatgtataagatcagtaggatctgtgctttctgtcatgtaattcatatcttcctgtgtacttcctaacacataaacaaaggaaaaatccccgttttctacactgccatattttaagtagacaccgccatcgtcgtatgcttcttcaaaactttccgggtaaaatacatcgtagcttaacacctgttttgctgccatacgatcgcagtctgtaccaaatacaccaccctttttgccgcctgaaaacagtaccagacagataacaagtacagctatcacagctacaccgccgatagctaacggtagtacgggaagcttctttcccggctgtatgtctgctttatctcttcctggacgtgctggtttttcttttactccgtttctggtctctgctttcgcagcctcttttgcctgggctttttcctgtgctgcccgctctcttgcccgtttctcttcttcccgcttttcctggacccggcgctcttcttcccgccttacctcttcctgctttcttttagcttcttctgccatttcctgagctcttttagccctggcttctgcttcttctgcctcttgctttacccgtctggcctcttcttctgcctggcgcctgtcttcttcctgtttttctttctgccgtctggcctcttcttctaaccgccggatctctgcttccatttctgcctttttccggctcatttcttcccttcgttcctgctctgcctgttcttcctgctgtttttttcttttagtagcaaataaagcatccgcttcgttccgatccgccatactccttctcctctctcttttctcccgatcatgtgtgacacgttaaaaagtaattactgccagttcaaatgttcccgttctgccatggaaagaatctcatcatggctcagttccacatcgccgaaccggacaaatatcccatttgttacggcactgttccagacctttggatctgtaagggtgcggaaccgtattttatctacataaggcttcatatccaaaagcaaccggcttcctgatataaagtcgatctgcaggatataaggttctaagggcttaacagccaaaatatactttctctccacatgagtcctccttccaagttgaataaagatcagcatctacgtgcgtgcacgcaatctgaccagccactccacaacactttcatactaaaaaagatctaccgtatctttactgtacgatagatccttctgaaaaaatattaactaaaggttagttattggtataaaactgttctaaaagctgtttccgcttggttcgggtatcccctgtgatctctaatttagaatagatctggttaatatattgctttaccgttccctctgaaagataaagccttgctgcgatctccttattgctcatgtgggctgccattaattctgtcagtttcaactcctgttctgtaagacatttaaactgctccggataagacttttcttttcccatttttttacaattttcttcatatgcttttccaagcgaaaggatttttgcaagaaattcctggtctatttccgggaatttcccttcaaagagggatgaaagatagataaaattttccacaaaaggcatgaccatatgatctttggaagcatctgaaagcgcctgttttaaaatcgttctggcctccccgtgttttccgatcctttcataggccgctgcagtctggatctgcacatgaagggcaactaaagcataatgcatagcactgcacactgccaggatcccttcacttctcccgatcaccttggcataggctccctgggctaaatacacctgattttcgatcatttccatcatcggtcttcccggcgccaggaaattcacagcaaaaagtctgtgttctccgaatatctccgggatcttctccacacggccgatcaatgcataataataagcgctggtgctgttaaaaatattgatccacatggaattatgatgcttcatcagatccatataacgctgttcaaaggaatacctctgtttaatgttcatacacaacgacagccgccgggacagaaaatcgcagcacaatgccatacattcctgaccattttcctcgatccgggcataggctccttccaaagcgatctgggcatctgacaaacacccctggataaacagtgcctctgcatccatgacccgttctgccccctgaccatgaccattggtaatcttataataatggggcatgcactcattcatttcttcctgctcttttaaaagactgcctggttccctgtggaacatcataagtacagagggcgaaccaaaggtccagccaccgtcattgcggatactgatggcaggccgcgacatctgcctgctggcgctgcggtggaaatgactcatttttgaaatgtcattgtacatcagaaaactggtgatcaggtcgcactctcctaagagatttccccgttcttccattgatatttccgtgtgtctttcaatgacctggatcagaaaatcttttaattttaacatctcctggatcttacgccagttaaacatacagcgcatcagcactaaaatcgataacggatgggcttctaaatcctcttttgggcatttacttaaaaagtttaatacatcatccgcctttaaagatgccaggagaattcccgcatctttccggatcactctgagggctgcatcaaaatttccgcttttcctgtaagagtccagtgcatgcagatactgcttatgttcttcgtaccatttgccatagcggtccagataaattgtctgtttctctttatccattgccataaaggcccgctctgcgcattccttcatcatatggtggaaacggtaggtcactccgtctgtaagacggctgacaaaggcattctgcttggtcatggcagacaacagctgttttgtgtcttcattttccgtaataaatttggccatttctgcagaaaattcatctgcaaggcccattacaacaaggaattccctttgtatctcagggagcggatcgatcatagctgctgaaaacatttcataaatatcggaatgattatccggcagctctccctgttccgcaaaggcgcataaattcaggtaaacagcggaaaaccagccttcactggaatgaagaagtgactcgatctgccggtcgcttaactgtgtaccgcaaagatgggcatagacagaaagttctgtatggtttaaccgcagatgatccactgtgatctgatgcagcttgccgcctaagccaaccactgcaccgcctgataaaaaacggtcccggctggccactaccagatgaacattttccgggatccgccttgataatgtacagaggaattcactgatccttgcatccgtaagaagatgaaaatcgtcaataaaaatataataatctgtctcgcctgccagaaggtggctgaggtcatctgcaaacagaccgccgctggccggatccgaagggcactcatattcctcaaaaaagtcaaaacctgcaaaccgaaaggcattctgcacgcttttccagaaaatcggaaggttattggtataaatgctgatgcggatcacaaccccatgatcctttttcacccgctcattcagataccagtttacagccgtggtcttcccatagcccataggagctatcaccgttgtcagggtacaccgggagatcggccgcagcttctcctgcaaacgctctgatatgtaaatggtgttcagatcatttttctttcttggcattttcatttccctcccccggtctttctatatccattttaccatataatataggtttggggaagaatattgtttattcaccagcagaacaaatgttctttattatatctatactttttataaaatgcatggtatactttttataaattttaatttatgaagaaaaatagatacacctgcaactgtcgagtaattctcgactgttcaaaatgatatgaaaaattttaagcaactaaggagcatttcatggatcattttaaattagtatctgaatataaacccaccggtgaccagcctcaggccatcgagcagctggtaaagggctttaaagagggaaatcagtttgaaactcttttaggtgttaccggttccggtaagacatttaccatggcaaatgtgatcgagcagctaaaccgcccgacgctcatcattgcccacaataaaacgctggcagcccagctttattctgaaatgaaggaatttttcccggaaaacgcagtggaatactttgtctcctactacgattattatcagccggaagcctatgttccttctacggacacttacattgaaaaggactcttcgattaacgatgagattgataagctgcgtcactctgccactgctgctctttctgagcgccgggatgtggtgatcgtggcttctgtttcctgtatttatggtctgggaagtcccattgattatcagaacatggttatttccctgcggccgggtatggaaaaagaccgggatgatgtgatcaaaaagctgatcgagatccagtatgaccgcaatgatatggattttaagcgtggtactttccgtgttaaaggagatgtggtcgacattttcccggcttactcggacagtgaagcctacaggatcgagtttttcggtgatgaagtagaccgcattatggaaattgatacagtaaccggcgagatcaaagcccagttaggccatgtggctattttccctgcctcccactacgttgttcccaaggagaagatgttagaggcaacagagcacattttagaggaattaaaagaacgggtggcctattttaaaagcgaagacaagcttttagaggcacagcgtatttcggaacgcaccaattttgatgtggaaatgatgcgggaaaccgggttctgctctggtattgaaaactattccagacatttaaccggtctggcaccaggagaaccgccctgtacactgatcgattatttcccggaagatttccttattattgtagatgagtcccatattacactgccccaggtccgtggcatgtatgccggtgaccgctcccgtaagtctactctggtaaactacggtttccgcctgccctctgcccttgacaaccgacctttaaattttgaggaatttgaaagtaagatcaaccagatgatgtttgtgtctgctactccttctgactatgaaagagaccacgaactgctccgtgcagagcagatcatccgtcctaccggacttttagatccggagatctctgtgcggcctgtagaaggacagatcgatgacctgatctctgaagtaaacaaagaaacgtccgcccatcacaaagtccttatcaccactcttaccaaacgaatggcagaagatcttacagattatatgcgggaagctggtatccgggtcaaatatctccactcagatattgatactttagagcgggcacagatcatccgggatatgcgtctggatgtatttgacgtcctggtgggtattaacctgctgcgtgaaggcttggatatcccggagatcacactggttgccattctggatgcagataaggaaggcttccttcgttcagaaacttccctgatccagaccatcggacgtgccgcccgaaactcggaaggtcatgtgatcatgtatgctgacaccattactgactctatgagaaaagccattgatgaaacagaacgccgccgcaggatccagcagaaatacaatgaagaacacggaattactcctactaccatcaaaaaagcggtccgtgatctgattgctatctccaaagctgtggaaaatcctcatgctgccgataccaaagatcctgagtccatggacgaaaaggaattaaagaagctggcaaaggaactggaaaagaagatgcgccaggctgctgcagagctgaactttgaggaagctgcaaatctgcgcgaccgtatgatcgaagtaaagaaaatgctgcttgatatactatgaaagtgttgtcaagcgactatggggactgcgtgcttgcacgcaaggaaccatagacatttgacaaccaagccggtatgagtaagcagggcgacagcccggattacgaatgctggcggcagttgtgggagtgccagcggcacgtaacaactgacttactttcatatatagtaaaatacacaggagaatatatattatggaaacaaaacttgtccttttaggaaccggaaccccaaatgcctgccccaatgccagcggacctgcttctgctgtagttgttggtgacagagcctaccttgtagattttggccccggcgtggtacgtcaggcttccaaagcttattttaacggcattgatgcccttcgcccggaccgccttaccgtggctttttccactcatctgcatacagaccacactgccggatacccggaccttatttttactccatgggtattagagcggcctgttccgttaaaagtttttggcccaaagggcttaaagcacatgaccgaacacattttaatggcctatgaaactgatattgatttccgtatccatggctttgaaaaggcaaatgaacagggctatcaggtagatgtaacagaaattgaagaacctggtattgtttataaagatgaccgtgtcactgtagaggcctttccggtaagccacggaaccctgatcagctacggctataaatttgtcactgctgaccgcaccattgtgatctccggagatactgccccgttggacattgttgctgaaaaagccgctggctgcgatatccttctccatgaagtagaatacagtgccggtatcgcctgcagggaaccaaaatggcagaaataccaccaggaggtccacaccttaagcacggacctggcaaaagtggcccagaaagcaaagccaaaacttcttgtcacttatcaccgcatctaccacatgaatatccaggataaccacatcaatctggaagcggaaatgcgacgcagggatgatgccatcttagatgagatccgtgctgccggttatgagggaatgactgtgaatggacgggatctggaggtattttaatgaaaaaggcactgttttacgggatacttgcttcatttttctttgcttttacatttttactaaaccgtagtatgcatcttgcaggaggatactggctatggtctgcatgcctgcgttatctttttacctttcctatccttgctgcggtactggcaatttcaggaaaaaagcaaaagacaaggcctctttcacatacctgggcagaaataacaaaagctcccggagaatggtttctctggagcagtgttggttttgtactgttttatgcgcctttaacttttggctcaactttcggtgaatcatggctggcagcagcaacctggcagctgaccattgttgccggtattttattaacacctttatggggtaaaccaataccgatcagaaacctctcctggtcctgcctgatcctggccggtgtttttctccttcaggttcccaatatgcggcaaatgaaactggagacaatggcattaacactgattcccattctcattgcagctttctcctatcccctggggaaccggaaagtcatgagcctggtttccagcgatatctctaccctggaacgggtctatgccatgactttatgtagccttcctgtttggatttttctttcaatatgggcttttatcactcacggactgcctggaagagatcaactgatccagtccttctttgtagcgcttttctccggaaccgctgctactgtcctgttctttaaagccactgacatggtaaaacacaaccataagtggctggcagtgatcgaagctactcagtccggagaagtgatcttcacactcttaggcggtatcctgtttttaaaagatcctgttccttccgcaatcggactggctggtattgccattatcgtagcaggcatgaccggaaacagtttatgccagtaaacaaaaagctgactctgctaaaaaacaggtcagctttttgccatttttaattacattgtatccatctttactttatttatcagttttttgtatacatgctccacaaaccatggttccgtggactttcccagtgcttcttccggagaaaaccaggctactccactgttctcgtctgcttttacggaaacattctctttcggatctgcctccaacaggtatgttacatttaaatgcagatggctggatacatatttacccttttttacatgaccatctacagtaagtgattccagggaaaagatctcttctgatacaggataaaccttggaaatacctgcttcttctttcacttcccggatggcaaccgacaacagatctgtctccccgtctgcatggcctcccagccaggaccaggaatgatagatgttatgatacaccataaggactttgctcctgtctttgtttaccacccaggcagaagctgttatatgagcgatcttattttcccttagaaatgcatctttctcatttttaatccagtttaagatcagcggtttatccatttcttcctgttcattatagggcctgtatttttctattgcatctattaactgctgtctggtcattccgttcctctccctgtaacttcttatccttttttctttaactgcacagcgtactgcttatagctgccccggcagccgcttcttccttataagcagacagtaccaatttgttttgaaataattcttccagcatttcacaaaatacaggattttttctcactccgttgcctgaaccgatgagatttttgatctggataccggttccatttttgatcgtcctgtacatctgatataattcatcacccataccttccagtattccataggtgaacgcttcaggagtaaaattgtcagacgttaaaccctggatgcttccgctgctttttggatctgttcttgtgccgtcaaaggttgtcctgatcttaagttttctatcttcagagatcctgttgctctgttcttttcctgtttttgcaaactgttccatcaccggataaagaaagctgtcttctcctgtagcagcctttacgacccttctgaaaaactgttccagcagtgcataggactttccgccgcataaagaagatcccaccaacaggtattttccattcagaaatggcctggcttcgatccccttttctgcaaaatactgatctgaaaggatcgagatctggccgcctgttcccatattgaccagcagggtattttcttcttttcccgctgccccgagaaaactggcctgattatctcctatggcagtagttacctggcgatttctgtaaagtcccagcttttcaatccctgtacatacttcaggaagccagttttcctttactcccattttgcttaatttttctgtttcaaatttcatgttccgaccatcgaaaaatccgaagcccgctgcattgcttacatgtaccactggctttttccggccagtaagacacattccaaaataatccataatggtgcaaaaaccaactgccctttccggaatcagcccatgttttaaattgcaaatgtgagtaaccagtccatatccagatgctgcctccagatcacatttttctttgatctcctggaccagagaacactgccctttttcacaaagacttcctctgccatcctgccatgtatacaaaggactgacacatgtacccgtctgatctatgtatacgatcccatgcatctgtccggtaagaccgatccgctctgtctgcgggtatttatctaaaagatcatccaacagtttttcagcctttttaacgatcgccccggcatcctggatcttttcccattcattggcagttggcataaagccgccattttctatggtttttgcttccagtaattttaccgttttttcgttttcatactctaaaactgcaccgctgatggtcgttgtcccaatatcgatccctattatctgcatcttctgttccccatctgtttcgtggtcataaaaatgtacggaacactatttattctacccagaacactctattttcttttctcggcgctgcttttggaagatcgccatctgcatagccaactacacagtggccgatgccttcccattcgccttctacacccaggtcctttaacaactgcttatactccggcagttcaaattcttctttcgccctgtggatccagatgtttccaagatctaaggctttcgcttccagcatcatattgcccattacaagacttccgtcatacacatgggtcggacagtttttgtcagccagcacaacaaggactgccggtgcaccataaaaaggatcaaatcctttctcccagcctccgatcctgcggttcatctctgacagtttatccctaagttccttattggtaacagcaacaatgatcgctgcctgctttcccataccgcttgctgcatacagaccagcctctatgatctggtttaaatcctctttagatggcatatctggtttaaacttgcggatgctgcggcgttctttcataacattcataatctcgttcataacaattcctccatcatttctgatatactttctgttttatataatattatctcacaagactttattttttcaatttatttatttgataaatcatcgattttttcttttaatgactgtatctcttccaaaataagcaccgtacatcccactacaagccctgctaaaaggataagacctccgtaaatgggatataaaaaggactcagctacacctccgccgactacattggaaagtaagttccaaaatcctgcgcctgggaaaatcattaaggcaaacattgcaactattgctattataactttactcattgtatatttccctccttaaaagcatctactgcctcttttattccatctaaatccgttccaccgccataatccagcaccactaaccgccttttatcttttaatatcacttcatccactgccggttctgcctcatatgcatcctcttgaggatcgtttccttcttgaccaccggatcttatcccgtctttgcggaccatataccggtaccaggacacttccatatcctctggaagcgctccgatctccgccggaatctcctgcctggtacaatcccacagttttgtcatatccttgggataacatttgctggttttgttgatgatccagggaataggacttgtatacacggtaacgcctataggtctgtcaatgctttttccactgggatcaccttcttcataacttgccaatatcgtctgttttctcccggtgtccggttcctcttcgctaaaaaaatgcgttgcagccccattgcacaatggaataaggatcatacaggcaaccccaactccaaccagataggtcatccagtcatctctattacttccacttccattttcccttacccattttcttacgaaaagggcgatcagtacaatgagggtggaggaaagtataaagctgatcagagcctccatggaagaaagaaatgccagcgctataactcccagtatcaggatcccatctcccataaaagtatactttttacatttcagggtccgtttaagatcctgttccgtaagaggctctcccttctttatggccgccatatttccatgactccagcgaaacagccgtatatacgtcgctgcccaggaaatgatcatacctgtcagcagcagagtcaaaagaagctgcatgggatctgcaaacagtttccctggattttgcagatactgatacacagcccatatttctaatacaaccaagataggatagaaaaatttcaccgaccagttccaggaaagggctttctggatctgaaactgtctctctttctccatatcgccccttcgttttgctgcatcatctgttgtataaaatatctgccagtagatgctgttgcactgaaaaatccagcctgcttcctcgcactgctcccgcaactgctctgctttccagtcatctgcgcctataagggaagagctttccggtaccagaagggcggcatatcttcgtttttccggctgtgccctgtaaaatctcatcacagcgccaccaacgctttctaaaaaccagccctggagtgccattttctccagatattgctcaaatgcatctgcctcacacaaattaaaagtaaaccagacccgtttcttttccttcatgtccccatcccctttccgcaaaacagtcctgttttctcaatgttctatctatgatcattatagataacgatcctgttttctgacaagaaagaggaacttactattttcttacatattacatgtgtatcttaaatccattgatctcctcgatcagcttacttacggctgtggaataggggatatttcttctccaggcgatcacagtgctggttttgatctcaggatacagttttttctggaccagaaggtccgatctccagtatctgcctgctccttccacggaaacaggatatccaagcccatacaatgccattaccccggcattggtcccaagattgcttgtaaatgcaatatttaaccggttaaaatcctttccaaaccaattggcaagctcactttggactgtcagccgttccggaaggatcaaaggcagatctatcagatcctcttttgtaatatattctttctctgcaaggggatcatccggctttattcctacgatccaatgatcacttccctggatccggatgtaatccagaccttctgtattcacaggttctaaaaacaggccaatatccaccagtccacggttcatcatttcaaaaacagtatctgcggtacctgtatgcacggcaaaacggaccataggatacttttctttatagatcttgcatatccgggcaaagatctccacagccataaattccccacagcctacggtgatcgtcccttctacgatcccgtcactgcctttaaattcactggcgatcttatcttccagatccaccatttccagcgcacggcgtttaagaaggatcccctcattggtaagagtgatcccatgtccgccccggtcaaaaagagtcactcccagttctgcctccaaagcagccagctgcctggaaagtgtaggctgggtaatatgcagctgtttggcagctttggtaaaactttgttcctttgccactgtcaggaaatagcgcaatactcttaaatccatataaactcctctttttatttcttttgccttcgcccattttttaatacctacaattatatcattgaatgttttcataaacaatgttactcttgatcaggcggattttaatacaggaggtttttatgcaaaacaaaagacaagttataacaaaggcattcaaatgtgcatttcctcatacaataccgatttttgccggcttttgcttccttgggatgacatatggtatttacatgaatgtatccggcttccgtttttggtatcccatgttaatgagcctgactattttcggcggcagtctggaatttttagcagtcagtatgctgcttgcgccatttgccccggtacagacatttatcatggcattgatgatccaggcacgccatctgttttacggaattgccatgctggacaagtttaaaggaatgggctggaaaaaaccttacctgatttttggaatgtgtgatgaaacattcagtatcaactatacagcggagatacctgctgatgttgaccgcagctggttttatttctttaccacacttctcaaccatttttactggttcagcggagcgaccatcggcgggcttgtaggcagtttgctaaaatttaacaccgatgggctggattttgtcatgacagcaatgtttacagttatcttcctggaacaatggctgaaagaaaaacaccacatcagcgagtggatcggccttggggcaagtatcggctgcctgctgatcttcggcgcagataattttctgatccctaccatgatctgtattttagttgccttaacaattcttagaaaaaccctggaacagagaaaagaggtggatgcagcatgactttatcacaacagatcattactattgctatgtgtgttctcggaactatgctgacacgttttctgccatttgcagtcttcagttccaaacgtccaacgccgccatacattcaatatttaggaaaagtactgcctggtgcgattttttccatgctggtggtctactgcctgcgacatgtttccttactgcagggcagtcatggattaccggagctgatcgcaattcttctgacagttggacttcacctgtggaaaagacaaatgttgttgtctattgcaggcggtacggtttgctatatgcttcttatccagtttatcttttaagaaaaacgcgcatatgaaatgccccatttatttcagaaataaccaaggccggagatccacagcggatttccggccttactttttgtttcttttatcgtttatttcagtttaccatattcttcatcagaaacaggctcgcaccactcattagagccctcaacaccaggtacttcaacagccagatggctgaaccagctgtccggtgctgcaccatgccagtgctttacttctgcaggaatattgatgcagtcgcctggtttcatttcaacggcttcttttccctcttcctgataatatccacggcctgcgacacagactaagatctggccgccaccgctctttgcgtgatggatatgccagttgttgcggcagcctggctcaaaagttacattaaaaataccaacctggctggtagatacaggttccaggaaactctttccggagaaatactgggcaaaaccgtcatttggcgcaccgatggggaataccatttcttttgcgtgggctctcattgcctcatcttcgtatggaaggtcgccttcatcatctgcccatacttcctttgccagattaaatacagcccagccctttggccagcctgcataaaaagcaacatgggtgataacggctgcgatctctttctgggttacgccatgagcctttgcattctgtaaatggaattttaaagaagagtctgtgataccggatgccattaaagctactacggttatgatacttcttgttttcagatcaatgtcctgattattccagttttctccgaaaaggacatcatcattataatgtgcaaaatcaggagcaaaagttcctaatgcatttcttcctgctgtctgaactacttttttcatctttctgtctctccttatctgtatgataaacttttaattataaggactttacccacttttcaatttcctgcttgttggctctgtttaaaagctttccttctacgatctcagctcccggtgcagatggctttaattcctttactgtattgccaaaaccgcttcctccggatgttgcaaagagcacgatcttcttaccggaaaaatcatatttctccaggaatgtatttacaatggtaggtgccacataccaccagatcggaaatcccaggataatggtatcatattcttcaatatgagcatctgtatctgtgatctgtggacggatcttcttatcgctcatctccatgctgcttctggatttcttattcatccagtttaaatcgtcatttgtatataattcctttggtgtgatctcatacagagcacaatctcctgcttctgcgatcatctctgctacttttctggttgttccgcttgcactgaaatatgctgctaatgtttttttcatggctaaaacctcctactgttgcttaacaatgaaaaataataaaatgaaaaatgtgcaggaccttttactttcatcctgcacatttattatataactcttttttctattatgtctaatacttatattacatggttttttatgcttaaaaagcattatcctgaaacaaactcatctatccctcaaacacaggatattttttcttatcagcatctgttattttgcggatcaccttacaggggttgcctgctgcgatcacaccatccggaatgtccttattcacaacacttcctgcgccaatgatcgtattacttccaatggttactcccagcagcaccgatacattggttccgatccagacattatctcctactgtaattggcagggcaatttccagtcccctacttctctgttcactgtcaatagcatgtccggctgtagaaaatacgcagttgggcgcaataaatacattatccccaaaagtaacttttgcacagtcaagtatggtaacattatggttcgtataaaaattttttcctatagaaacattaaaaccgtaatcacagtaaaagggagctgtgatcaccggatctgctcccattcttccaaggatctgtcccagtaatttctgctgtttttcagtatctgatggcctgcagttattaaactcatagcacagatccgcacagcgtgttcttgcttctatgatctccttatcgtaatttgcatcatacagatagccattttgcgccttttcccactcagtcattgctctgtctcctataccctttcatcatttctcttcatatacaaaaggggatagggatttccttcctcatccatatctgtccttttgtatgtttcaaagcccatatgctcataaaagccaactgcctgaggattttgctcatttacagtcagttcctctatcccgtaattctggatcccgtataaaagcaattgttttccaaggccttttcctctttctttttgggaaaggaacaacatttccaggcggtggtcttctatccccataaatgcagctggctcacctgaaccattgaccgcaataaccaggctctgtacaccggctaatgcctgtgggacatactcttttatcttctcaatttctttttcagaaagaaattgatgagttgccctcaccgactcttcccacacctttaaaagctgttccatcaacaattctgtgcgctcttttacttcatatattttcatatttaccatacatttcaaaatgtaccttatgttctggaacttcagataacttacggccttccggatgcactgccggtacaccgatcgataagaccgcctccagacaatattcctttggataacctaaaatatctcttagatattcttccgttgttcttccatcaggtgcctgtcttaaacgtccctggatccagcagcttccaagccccaagtcgtgggccatgttgtgcatgttggacataacaatggaacagtcctctgtccatacgtctgtcttttccggatctgcgatcacaacgatcgcagctgaggcgcctgccagcattttcgcagaacccacgcggcactcagacattttttcaagtgtttctttcttctgtactacgatcagttcccatggacggatatttcgtccggatggagaaagcagacctgcctcaacgatggcctccaatgcctccttagaaactgcttcctctttatattgtctgatactccgtctatgctttaaaagatctaaaaaattcatccatgcaacctcctgtaaacaatttatctgttattcctcctcaggatacgtaaaatgccaggactttctaaactccgtcatcagatccattacatcctttgtatagtccagatgcatacaggaaacatccccggcaatcgccttttccatatcagaaagctcataagccagtgcatcctcatgaactccggcctttatcacctgggtttctccgctttctgcgtccacgatcttcgcctcccaggcccttggatactccatgatctcaatatagcccttttcgcaggataccatgcctctctttggctgcttggagtgcagggacagcatcacggtagccatctgtccttccttattggtaagaagcagccccgcctgctcatctacccctgtaggcgccgccttcatctgggacaataactgatccggcttggagtccataaaccaccggataaaagaaagagcatacacgccgatatccagcatggcacccccagccaggttccggttaaagaaacggttttccatgttatattctttaaaacttccaaaattcatggtgatcagatttacttttcccagctttccggactccaaaatcttcttcaattctttatagaccggcatatggaaaatggtcatggcttcggcaacaataacccccttctcctttgccagctccaaagcttcatccagttcctcactatttaaagtaatagatttctccaccaggatatgtttcccattttcaatggcctttttcataaactggatatgggtattatgaggcgttgtaatatagatcacatccacttccggatctgtgaacatttcattaaaatccgtaaacacctttttgattccgtacttctctccaaactttacagccttttcataggtcctgtttcctactgcataaagctttttcccatttttttccagtgccgttgccatttcattggcgatcacacctgttcccagtacagcccagtgaatttctctcatcctgcgctctcctttcctgcgaaaatattttgccagtcttccttatcggatctctccttttctggctctcctgttcagtataaccataaatccaaggcaaagcaatagctgcactacagatgacataggggttgccagtccgatcttaaataaagatgtatctggcctgagactcatcagatacgatacaggcacacgaactccaaaagccccggcaattccctgtaacataacaaatttggtctgtccgatcccattataaagggccttctttgcccggtccatccttcctgcgccataattctgggccacaaaagcagacatagactgcataaaagcagatgaaataagcataataaaagcacatactttctcagccactcccacacctgcagaagcggtcactcccatggaatttacgatcgccaggataataagaaacgaaatacttaccagaagatcctgtaatgcgatcggcgctccaaggcccgccattttcttaagtaacgtcttgtggatccgcacattctccttcttaaacacaaagggcagctgtttctttctgataaatccaaaagacacgaccactctgactacctgtgcaaaaacagtagcacaggccgctcctgcagttcccatatgaaaaccggcacacagcaccagatctcctgcaatattacaaacacaggcgatcgcaactgtaaaaagcggcgttttggagtccccgatccccctgaaaatacaaccgatcaggttataagcaacaataacgatcataccgcagccgcatatccttacataagcagccgtcttgtcaaaagcctcctttggagcatgcataatactgctgatctgaggtgcaaaacacaccagaaggacagtcatgaccaatgcaataccagcaaacatcaccatggccgttcccactgcctttcccccttcttccttctttccgcagccgatcagctgtcctaaaagcaccgtggttcccatagcaaaactgctgatcagattggtcaaagtcatcatgatctgagaacctgtagacaccgccgatacatccgcagaagacgcaaacttacccacaaccaggagatccacagcgccgtacatagcctgcaaaaacagcgcaaacaacactggcatggcaaacaaaataagaggctgtaagatcttcccttctgtaaatgtcgtatttctctccattgtacattttctcctttttcacattaaaaaagccggataagaagcaggcatctcagcccgccatcttatccagctattgtttctaaagaacaacttgccctccgatgaacgttccacatatactataaaaattttcaaacatcaactgccagatccacatctttggctcaaatcatttctattaatctctgtcattcagataacctggttcattataaataagagccataaactctacatcagagtcagaattattctcaatgctgtgatactgtcccacttcaataatacagcagtcaccagggccaaccttagtcacagacttgtcattatcaataaaatctgcttcaccctttaaaatataatatggctcagtgtcatgtacatgctgatgccagcctacacttgcacctggaggaagaactaccttagcatacagtctgccgtgtcctaacagctcctccttagatacaatatgatgaacatacgctgttcccttacctccgcctaaatgttccacttccagaacgttgtctttacgaatcatggtcatgccctcctgttgaatataatcctgaagcaatttgaaacactttactgcttatattttctcattatactccatttctctcatttttccaagaacaggacgcgatttttctttcgcgaatgtttcattttgcagcaaccatctgctcttattccctttcctgcgcaaacttctgaaatgccttggctgccacacttaaaggatactcgctgtcccgtatcataagaacattcctttccggaaatgcctcttccagatcaatggcaaatacaacacctgcttttaagtcttccgctgcaatctcctccggtataaaaccaattcccagattatggcgcactgccggaaggatcagatccgtagtggccagttccagatccggtgaaaatgtcaggccatactgcaaaaaataggaattcaggaaattacggctgatcgcctcggaagtaaggctgatccacggcagatctgaaagctcccgcaaagaacatttccgtccctttaactgctcaaatctggggcctccgatcaaaatctcccgatagctgcgaagcactttcattttcaatggatcccccatatgcaaaggaagagacgaaaccactgccatatccaccttaccatcacgaactgcctggatcgagtccctggtactgttatttaagatctgaaaatggaccttcgggtacttccggctaaactcctccattgcctgaaacagataacaatgaagggctgtctctgtggcactgatcgagatcgtacccttttccaggctcagcctgtccttcagatcactttcccctttaaaaaactgggcgcagcctgctgaaacatactcaaaaaactgctgtccctctgccgtcagctccatccccatcttgctgcggataaataaccggcaccccagatcatcctccagcttatgtatggtccttgttaccgccggctgactggtattaagggcagatgcagccctggtcagatttccatactttgcaacataataaaaaatcctgtagtattcaaaattagatgtcataactaatgtcccttctatctagctagcttcgactcacggacacgcgctaacgcgctcatctgtctgctgacgcagacggtccgttcgtgaatgacgcaagaaaaacaaatgtcgccttgcaggcgccgcttgtttttcttttgcgcctttccataccattctgatatgaatataatacatttttgctattttacaaccctttttattcgtggcatattatatgtgaaaaaaataacgtgcatttgaaaggggcaacatcatggaaaacaacaccggcacatgtcttgaaaagcagcctttatgtgaggaaatgcttacaaaaatgaacgcatactggcgggcagccaactacctgtctgcaggacagctttacctgttagacaatccgcttttaaaaaagccattatcccttgaccagatcaagaaaaagatcgtaggtcactggggaactgtacctggacagaactttgtctatgtacattgtaaccgtgtgatcaaacgttatgacctggacatgatccttttatccggacctggacacggcggcaacttcctgatcgccaatacctatctggatggaagctacagcgagatctatccaaacatcagccaggacgaagaaggaatgcagaaaatgttcaagcagttctccttcccatgcggcgtgccaagccactgtgctcctgaaactccaggttctatcaacgaaggcggcgaattaggttactccattgcccacgctttcggtgctgtattcgataacccggatctgatcgctaccgttgtagtaggtgacggcgaagcagaaaccggcccactggctacttcctggcagtccaataaatttttaaaccctgtaacagacggcgctgttcttcctatccttcacttaaacggatacaagatcagcaacccgaccatcttctcccgtatcccacatgatgagattgaagatttcttcaaaggctgcggctggaaaccatacttcgtagaaggcgacgatccaatgaccatgcaccgcaagatggccgaaaccatggataccgttatcgaagagatcaaagccatccagaaacatgcccgtgaaacaggagatgcagagcgtccaaagtggcctatgatcgttcttcgtacaccaaagggctggaccggaccaaaggtagtagacggccagaagatcgaaggttccttccgtgctcatcaggtgccgatctccatggaaaatccggaagaacacttaaaactgttaaacgactggttaagaagctaccatccagaagaactgtttgacgaaaaaggccgtctgatcccggaattagccgaactggctccaaagggaaatgcaagactgggcgcaaacccacatgcaaacggcggacttctcttaaaagacctgcgtctgccagatttcagaacctacggaattcctgtagaacctggaaagaccaaagcccaggatatgatcgaactgggcggatacatccgtgacatcttccgcttaaatgaggacaacaaaaacttccgtatcttcggacccgacgaaagcatgtccaaccgtctttaccgcgtatttgaggcagaaaaccgtgactggaacggtgaattaaaagatgacgatgacaaactggcaagaggcggacgtatcatggacagtatgctcagtgagcatatgtgtgagggatggctggaaggctacctgcttacaggacgtcacggtttctttgcaagctacgaagcatttatccgtattgttgactccatggctgcacagcatgcaaaatggttaaaagtatgcaaccagctttcctggagacagccgattgcttccttaaacttcatcctgtcctccaatgtatggcagcaggaccacaatggttacacccatcaggatccaggcttcttagatcacattgcaaacaaaaaagcagacgtagtccgcatgtatctgccaccagataccaactgcctgctctcctgctttgaccactgcatccgcagcaaaaactatgtaaacgccattgttgcatccaaacatccaagctgccagtggctgtccatggaacaggccgtaaagcactgcacccagggtatcggcatctgggaatgggcaagcaacgactgcggcgaagaaccagatctggtcatggcatgctgcggtgatacaccaaccctggaaacaatggctgctgtcaccattctccgtgacgaactgccggaattaaagatccgtgttgtcaatgtagtagacctgttcaagctggagtccaacaccaagcatccacacggcttaagcgatgccgaatatgatgcgatcttcacaaaggatacccctgtcatcttcgcattccacggctatccaaccctgatccacgaactcacctacggacgcaacaaccacaacgtatccgttcacggctatcaggaagaaggtaccatcaccactcctttcgatatgcgtgtccagaaccagttagaccgtttcgaccttgtaaaagacgccatcatgcatcttccacagttaggaaacagaggttccttcctgatccagaagatgaatgacaaactggtagaacacaaacagtacattgccgaatatggccaggatctggaagagatccgcaactggcagtggcacactccagaagacaagtaaaacaagtatataaaaataccgcctgggcagcaatccagggagtatcctaaagtttgtgtaaacctccaaactgatgtaagataaaattactcagtttggaggttatttttatggcaagaagaaaagacagcccac

SEQ ID NO: 3558 - DNA, 96554 bp, Unknown
  gut microbiota DNA sequence
taaatttgtgcttgaagaacagcagaattttacatacaatggcgaagctcaaaagatcatggttcagtctgtagaagatcaggatcctgaaacaaagtattctgttctgtataaaaatgaccagacagacgaaaatgcttccctggaagctcccgttcatgcaggaacctatcgggctatcttagatctgccagaaacagcaaattatgctgctgcccatgcagaagtgatcatgaacatcattcctgcaaaggcaaccatcgagatccatccggtttctttcagctttgatgaacagacccatggaggatcctatttggtatatggtattagagatgaaattcctgagcatgaagtaagctacagtacagataatgaaatatttgtggcagacgagccaatggcagtaggtacttatgcaatgcgaattcagatcacagatcctgactatgaaaatgatgtagaaacacaggaagatgcagttgtcatcaaggaaaaggaaattgttcctgtaattgcagaagcgtgccttgatattcaatatgtatgtaatggtcagatcgtaggacatcagctcgtaaaagtagaaggaaattccggtgatctctgcctgtttacagatgaaaatgtagtgttggaaattcctgaaggctatgagaaagaagctggtttcggaagtattgaagttccttatggcgaaacagcgcagacgattgtttctgtaaagctcaaagaaacccaggatgataatgaaaaacctggtgataacggtgacaacgacaacagcggagataatgacgataacggaagcaatgacaataacggaaatagcggtaacggaggtaatggcggatccagttcatctagtgatggttcttcctcttccagccgtaagaccattatttccgaaagcggaagctggcgtcaggatgaaaagggtatctggtttgaaagagcagctagcggatatccgaaaaactgttggagttttattgatggaaaatggttccattttaatgcagaaggatacttaacacttggctggtacctctcagaagacggaaagtggtactattgtgctccagacggaacattgggcacaccgatcggagctatgtataccggatggcttaaggatggagcagatggttactggtattatctggatccaaacacaggagagatgttaacaggctggagagagatcaagggacagtggtactatctcaacccggaaactcttggtgacagtggctggatgcaggattcttcaacaaagcagtggaattataatgtgaaagccgttatgccaaaaggcgcactgtatgtcaacacacagacaccagatggttatttcgtagatgaaaatggtgttcgcagataatttctaaattaaaaggcaatgcagagtcagatgtttttccagttctgcattgccttttttaattttacgagtaatttgcctttgggcgctgattttagggggtgatcccctgattttctcttaatttaaccgcattacgggcgctgcgtcgacgctcgtcttcaagagcagcataatgctttttagtggtattaacatcggaatggccaagaacatctgctaccagatatatatcaccggtttcccggtaaaggttagtaccataggtgctgcgaagcttatgcggagtgatcttttttaacggcgtaacgatctttgcatatttcttaactaaattctccacgctgcgcacattcatacgttttttctggagagagaggaagagagcattttcactgccctcttcggggataatgtcatttcgttcatccagatagtcctgtagcgccgtttctacttccgtaccaaagtaaacagtaacttctttcccgcctttccggtgaatatggatcccaccatttttgaaatcaatgtcatttatgtctaatcctacacattcagaaacacggatgccggttccgagaagcaatgtgagaagagcgagatcgcgcagtttagtccggttgtgaaacgctttctgcttatcagtcagaccatccccttgttccactgcatccagaagaagagcaacttcatcaatatcaagacggatgatttctttttcatgaagtttgggaagctggaccaaagcagcaggatttgttttcagtttttctgtacggaaaaagtagttataaaagcttttaagggaagagatcttgcgcataattccccgttctttattaacaatttcctgattgtgctcattaaagcgatattttaaatattccatatattcttccagatctgttaccgtgatctgatccaaatgatctaatgtaaaatccattcgttccattttggaaaaaaccggattttcctttttgaggaaatcgaaaaaaacagagagatcataagcataggcaatccgggtcctggtagaagttcgtggttcgatcccacgaaaaaattctgtacagaagggtgggagagtcttcgtcatttcccgcagcttttttatattctcaatatctttttgttcgtaatagggtagtgtcgttgccataattatgtatgcctcatttataatttatatataataaatattttcagattattttgtattattatttagaaagcctgggccagtcttcaaaatttccgttaatgaccgcatgaaataaacgttcacggacaccgggattgtccatattcagtgtccggatcagatttttcacatattcacggtgtgtatgtccatccataggacatggatttttacagacaggaagctgatatttattccgaaagccttttacatccgcttcggagaccagcatcaaaggacggataaccgttaaatcggtacgatccaaatgggtaaccggcggaaaggcataaaatcgtccctcatataaaagcgacattaaggcagtttcgatcaggtcgtccttatggtgggcataagcaattttgttgcagccaagttccaaagctttctggtttagggcaccttttctcattttcgcacacaaagcgcatggattagactctttacgggcttcaaacaggatctttccaatttctgtggagatgatctcatagggaacattaaaatctgcgcaaagggcctttataggctctaaattcatagtatctaagcccatatctacagtaatggcagacagggtgaaatgcttcggataaaatttctgaagctgtgacagaccataaagtaaagtaagactgtctttaccaccggaaataccaatggcaatatgatcaccgttttcaatcatctggtattggtcaatagcctggcggagaaggcttaagagacgttggagtttcatttgagagtgggtcctttctgaacgagaattaataaagatgattttgttttagcatgtacggattatattaattaaaataaatatagaaatttcagaaaaatatagagacattaaggtatggagagtgatattcaactattcgcgaaacaatactttaacgaatagttgaaccgatttcacattatattcttaataaaccacttacatacatcccaatattttcaattatttccacatatattttatttcatttcatctacgcataaactgactaaaagccctagtatttaatccagggcttttaattactgttcaatcaatccattctattatcgattatatactacaattgatcatttacattattctcaagtatcaatatcatttaaaaatcatttaaaatcatttaaagcaaatcacaaaatcgttctcaaaatcccgcttaaatatcccatagccagtttctcatccggtccatcggcagtcaggatcagggactctccctgtttggcgccaaggctcatcagggataaaacgtttttgcagtcggcaactcccttggcactttccagtgtgatcttgcattggtagtcggaagcggcacggcttaagctcatggcattggctgcatgaagtccgtgattggtagaaataacataacggcagctgatcataatggcatctcttctttcgcaataatgttgttttaaaatcgtttatttgttatttatttatcttttgaaagcattttaacacagacttttgacaaatacaatattggaaattaaactcccggacctatcggatctgtatttcctgtattttcaccagaaacattgtcattttctgaattttcggttgttttctggacaccaggtcctttggaggactcatccgctgccgtttccgctttttctgtttcttttggctttacagtacctgggccgccttccgatgcgctggtagtttctttctctgttttggagtcgtccagtttttcaataatagctgctgtactctcttctgctgctgttttatccgttgtatcgccggtctcctctgttgtttcttctgcttcagaactttcttcagctgctgtttgtgcagcagtctgggccggagcattatttttacttgttccggatgactggctcttgctgtctgattttccggaaccggaagaagtcggagccgccttaccaccttcataaaaacctgattcttcagcaatatgatcactgattttctttactgtagaagaaggactgtatagggcgtcttccccatacaggaactgatgaagggtaactacgttgctttccagtgttacagggataacacagtccatttttcccattttctttgttttctgtgcaaatgggaagcctgctgtttcaccaatatgatacttacttgcattctttgccattggaagtacatcatcaacacccacactggtggagatctgtgggaggatcgcttttaccagatttgtacgggtagcaaggtctgcctgttttgctttttcaagggccagtgaaataacctttctctgacgctctgtacgctggaaatccgtatccatgagacgcaatctacagtaagctacagcctgtacaccgtctaaatggtttggacctgcacttgccagctgtgtggaaccaatgccagtagaattaacagtttctgtaataaaggcattaatatacttaaattccggctgtgtgatctctatatccacaccgcctaaaacattgatcgcctgtgcaacagctttccagttaaatgtagcgtaatcgttgatcttcacatccaggttctcttccagggcagatacagcctgtttatgaccgcctttgaaataagcctcgttgatcttatggtaggtccccttggagtcgatctttaaatatgtatcacggtaaacgcttaccagttttatttctcctgtttcctgattgatactgcagatcagctggacatccgccagggcgtttttcgtatttccgtcacggctgtctacaccaaataccgcaatattccagtatcccgtagctctgtgaaggaaagaccagcctccatatacacaaagcaccactaaaaggcttaaaagaataactggccattttgcttttttccgctttctggatgttttaccaggattgtttctgccggttttacccgttttgcctgatgatgcagaagcttccacatttcctgtagttccagatgtgctataacggttgctggtttttctttttcccctgctttggttgctatattcgctatatcggtgagaaacacctgcactgcggcggttgtcgttttcaaaaggaacttccagtccgttcggatccggttcttcctcatattcatagtcgtaatcttcttcttcgtaataatcctcgtcatatgtatgatcgacaggttttgtctgtcttggacggtttttatagtttcttcctgttccctggcggcgggcccgcaaacgctgcagttcgtcaccttccttattttcatgtaaacgcatgatcggttacctctattcttttctttcttactaaaaataaataccgtttatttttcccggcggtttggtccactcacgaaccccgcgctatcgcgctccactgtctgctgacgcagacggttcgttcgttgatgagcttgcgaaaaatgaatgccacctgcggtgtcgcttacttttcgctgcgctcatcacattataacatacccttttagcaaaatacagtgtgaaactcttacagaaactttaaggcgggttgggaaaaaggcagcataatagcggcaaaattaagagttgacgcatattgtaaatatgagatataatatacgggatttgtttttggaggaaacaaagataatagtaaagctatagcgccatgcacctgggtcgggtcgtgaacagtaacggatgaatgaataataacttactgctgacacaggttaacgaggtggagagagaatcgaacatattcggcgggtgctctcccatgcagtccgggcgtgttttataccggaaaaatatgcgggtaactgcaaaacaaagctggtataaccggacagaacagatacgaaaagcaaaacgtcaaaacgaaattaaaacaaggttaaaatggaagcagacagtcatatatcagggggctcatatcccttttctttgcgtacgcaatagtcggatatttacggctgctctgggaaaggaattgtattatgtgcggaattattggatatacagggcctcttgaggcagataacatacttttaaatggactggctggtctggagtacagaggttacgacagcgccggtatcgcttattttggaaatgactccaagatccatctgatcaaaacagtcggtaaagtagcggcattaaaagaactggtaaaacaggaaagcgactgctcttcccactgtggtatcggacacacccgttgggcaacccacggcggtgttacaacagaaaatgcgcatccacaccgtcagggactggtaactctcatccacaacggcattattgaaaattatcatcagcttacagaagaatatgatctggcggatcatctgctttcacagacagacagtgaagtagctgccggtgtgttaaatgccctttatgagcgtatggatcatgatccgcttctgtccatccgtcattttgtaaaagagcttcagggttcctacggcttctgtatcatgtttgaagaccgtccaggtgagatttatgcagtacgcaatgtaagtccccttgtagcggcttatacccactcaggagcaatgatcgcctctgaccttactgctctgatcgcttatacaaaagaatattttgtagtgcctgagggaaatatcgttcgtctgactccttacaaggtacgtgtttatgatatggaattaaaccgtgtcgagccggatatgatggaagtaaactggaatgtggatgcagctatgaaaaatggtttcccacactttatgttaaaagagatccacgaacagccggatgcattaaagaataccattcttccccgtctttccaagggacttccggatctgacagatgacggtattccggattttatcttaaaagactgcagccgcatccatgtgatcgcctgcggaaccgccatgcacgcaggaatggtggcaagagctctgatcgaacctggtatccgtattccggtcacagtgtctattgcatccgaattccgttatgagacacctcttattgacgaaaagaccctggtgatcgtgatctcccagtccggtgagaccattgataccctggcagctatgcgtcttgcccagtcttatcatgcaccggtcctggctattgtcaatgtaaagggctccaccattgcaagagaaagtgactatgttctttacacacacgcaggtcctgagatcgcggtagccagcacaaaagcatattctgtacagctggctgcattatacctgatctactgccgtatggctcttgttcgaggcgtatacagtccaaaacaggctgaagattttatgaaagaactcttagatgccatccctgctatggaagctatgatcagccgcagagatgagatcaaaaatattgttactcatattatttccaaaaatgacgccttctttataggaagaggtcttgactacgccttctccttagagggagccttaaaattaaaggaaatctcttatatccacgcagaggcatacgcagccggtgagttaaaacatggtaccattgcactgatctccgagcaggtacctgtgatcgccattgctacccaggagcatatttttgcaaaaaccatctccaatgtacgggaagtaaaggcaagaggcgcttttgtgatcctccttgtaaaagactctgctgtgatcgaagatgatatcgccgatgttcagatccgtatcccggatattgcagacagctttactgtgttcccgatcgctgctatcttacagctgatcgcatattatgcatctgtaggaaagaacctggatgtggaccagccaagaaacctggcaaaatccgttactgtagaataaaataagaatactggggaaaaaatccccagtattccgtttacaatattctatatgttttatgtagcagttttatttctgctttttccattcctgtttcttctttgccagttccatgataatatcaacggcaccttcctgtcctacagcgctgctgttgatacacatatcatagctctttggatcgccccattttttattggaatagtaattgtagtagctggatcttctcttgtcagttttgatcatcagatctttcgcttttgcttcatctacattgtaaagctcactgacacgtttgatcttgtctgcttcatctccggtgataaatacgctgactacatttggataatcttccagggcgtaatcagcacaacgtccgataataacacaaggaccttcatcagccattttctttatggtatcaaactgtgcaaggaagatcttatgattgatcggcatatccgaataaccggtagctgtataacccatagaataagaatccattaccagagaataaagaaaactgctggttgggcgctcgtcatgtttttcaaataattcttcacaaagtccgctgtgctttgcagcctgggcaaggagctccttatcatagcatttaactcccaatttttcagcaagcatctctcctatcttcttgccgccgcttccgctctgtcttccgatggtgataataagatttcctgacataaaacctacccctttccgcttagcgtctgatgtctgttcatctcgccgttcgttatattttttctagcatttatcttttatacctgtattataactcaaaaattcagaaaagtatatagaaatataaaaatgtccgacaaatgtcggacaaataggctattcaggtaatgtattcaaaagcttttcaaaatattcgggaagcggggctgtaaattccatatactctcctgtacgtggatggataaatcctaaaattccagcgtgaagagtctgcccttccagtccggcaataggacattttccaggtccgtaaaccacatctcccaaaagaggatgtccgatacttgccatatgcacacgaatctgatgggtacgtcctgtttccagccggcattccacatgcgtatactggcggaaacgtttcagaaccttataatgggtcactgcattttttccatgattatagttaatgctcatttttttacggtctgtaggatggcgtccaataggagcatcaatggtacctgtatcatcttttaacacaccgtggacaatggcctgataccgtctggtaatagaatgttcctttaactgagccgcaatggaattgtgggccatatcatttttacaggcaataataacacctgtggtatccatgtcaatgcggtggacgatgccaggacgcattacaccgttaataccggaaagctggtccttgcagtgatacatcagcccgtttaccagtgtgtgtgaataatgaccggcagccggatggactaccatacctttaggcttattgatcaggatcacatccatatcttcatataagatatccagatccatatcttccggttcgatctccggttctaccgcttccgggatatctaaggagatcacctcgccttcttccacctgataactggcttttacaggtttgccatctaccaagaccaggccgctttttaacagtttctggatataagaacggcttaactgttcatttacagtagaaaggtatttgtcgatccgcagaccgctgtctgctatttccgggaaaagttcctgtttcactgatctccgcctttctttttaaagctgaatacagccatatcctcgtctttataatagaacatgatcagaagtaccagtccaacagcggagcatgttacataacagtctgctacattaaagatcgggaagttgatcagggaaaaatacaggaaatccactacgtagctctgggtaatgcggtcgatcatatttccaacagcgccggaagcaataagcatcaggcatacagcaagaggacggtaatgttttccatcaggcatacgccataacatgtaaagaactcctgcaagaactaaaacagcgatcaggaaaaagaacagctgcttctcctggagcataccaaaagcagctcctctgttttctgaataataaagttcaaatacaccccggatgagtaccagaggggagtttccctttaaatatgcgctggcaagcccctttgtccactgatctaatcccaccaggatcacaaaccctatgagaaaacgtacaaagagggaacgtttttcttttgtcattttctgtctccttcattaccgccgcagatcaggtcaaaacctgttttcatctcttcttctgtaacagtacggtctacataggcatttcccactgtttttaaaagaatgaattttactacgccggaatccatttttttatcactttttgttgttgcgtaaacgtctttccagtcaagaccgcttacagtaacaggcatttcaaaagcttcaaaggtatttttaatgtcctgtacctgctcttcgctgatcattccccgcagagcgctgatcttaaaagctgcaatacatccaagacccacacagtgaccgtgaaactctttgaaattcattaatttttccactgcatgtcccagggtatgaccaaagtttaacagggcgcgctctccctgctccgtaggatcattttctactacctgctttttgatctcgttgctgcgatataccatatcttcacaaatagacaggtctctctttaaaatagactccctgttgtcttttaaccactgataataagatgcgtccttgatcagtccatgcttgatcacttcgcccattccagaggagaactgctcttttggcagggttaaaagggtattcagattggtatagaccagtcttggcatatgaaaagcacctaccatgtttttgtaggcatcaaaatcaacgcctgtttttccaccgatactggaatctacctgggaaagcagggtcgtagggatctggataaaatcaatgccccttaaataggtagcagccgtaaagccacacatatcgccgatcacaccgccgcctaaagcagctaacatatccttacggtcaaaatgctctaaaatgagatgttcatagatcttttttactgtatccagatttttattctcttctccagccgggataacaaaataagagatcttcttacagcatttgcttaaacgttcttttacttcttccagatataaaggagccacattggtatctgtaacaatacagatcttgcgctcagacagatggaatttatttacctcttctgtcagcttttcaaaagatggttccattacaatatcgtagatcggtttctggtctttatatacattcaggcgttttgacatatcattctccttagtcctgtttttcgtatttttacatagaaaatcggcagactcatcaggggtctgccgcatgctttggtattataaatggatgttcaggctggacatgtccactcctgagctgacacctgctgacaggatgtcctgaaaatcaccggacagttccacggaatcaggtgttgcaatgaagatgtaattggaaatcttctggagatttccgttcatggaataagttgctccggaagtgaaatcaatgatccgctgcgcggtttccatatgaattccttccatattaagtacaactgcttttccagagagaagataatcacagatatctctggagtcgtccatagaagtaggtttgatcattgtcacttccatacttcttctcataggaactacttttggatttgaacggcctaaaaattttggcttttcctgtccctctggctcatcttccggttctgtattatttctctttgagaaaagtcctttcttaggagcttcatcttcaaagtcatcatccaggtagtaatcgtcctcgtcatcttcagaacttaaccgcatggtatccattaacttacctaacagactcattttactctctccaatcctcttttcatgctgcttactgggcagcaccatatagccgggcaccgaaaatgccggttccgactcttaccatggtagcgccttcttcaatagcaacctgataatctccggtcatacccattgaaagcacatccatagtaacattatcaatgtttttcttacctatgtcaacagcaaattcatataattttttaaaaacttctcgattttcctctggattctctacaaaaggcgcaattgtcataagccccttaatacgtacatgggggaattttgcgatctcccggatcgctgcttctgtatcttccaggaaaaagccgtatttgctctcttcttttgccacattgacttccagtaaaatgtcagcaaccatatctttttttgctgcttctgtttcgatctgttcagccaggcgtaaagagtctacagaatggatcaggactgcttttcccataacctgatgtactttgttgcgctgtaagtgaccgatcatatgccagcggatatcttccggaagttccggctttttctgaacgatctcctgtactttattttcgccaaaatccctagcacctgcctcatatgcttcttccagcataggtaccggtttggtcttgctcactgcgatcagagtgacctcttttggatcacgtccagcccgtttgcaggctgcttctatattctttcttacttcttctaactgttctttaatcatggtctgttcctcctttttataatagaaaaattactgataaagaagctgtccctctcctacagaggacgcgtctaatacgatatgatcataaacagaaagcccataagttacattgtttttaatggtataatactcactgttggagtccaatatctctacctgggtgaagacggtatatcctttattaatattgtatacacccttcagggaagatgtacggccgatctggtaccggtcagaagactctggacggacaatataatctcctgccttaaaatcaccttcttcatccactgcaatatagtagaattcatcatcttcaaagccaatattggcaggcacaaaaagaatggatgtaccgttggcatcatagatctccttgttaaatccaatgtccatggagtcaccgccctgggctgcataggattttggcagcatgtaaaagttcttttctgtaaccgcacttacagggatctttaagccctttgcctgaggctgttcgatctcaaaatcaataaagcggtccataataaactgggccatatagcggttcatatccagcttaccataaacagccccgtcttttccagtaaaagtagaataatctgccgtggttttcaggtcataatccttaaaatccacagaaagagatgtcttatctgcatataaagaagcgtcatcattggaaagtggaaagacaatggaccagttttcagaggaagcgatcttataggcaggtgttccgctttcgatcagatccccggatttgtggatattttttgtataattggctttgttaaaactttctgcttctatatcagaaggctgtaaggactcataggagtcgatcccataggaaacaacaccagctgtatctgaacggacctgctcaaacacaagactggaatcctgggagatcttatctaactggtctaaggcactgaaactggaatattccataacagaagcctctaaggaatatctggcgtcataaatagagtcaaatttttcatcagacatggaaagcacataggaagataactgctttttcaggtctgcaaggttttcatcaggaagtgcctggttttctataccattttcttttaacagggaatccaaacgcccggtctcatctaaagaatagatccgggttcccacagaggcccgctttccctctctgaggtaataattgatataaccactgttctgggcatttcgcacctgttcatcccgcaggatcaggccggtatactgtttgttgtttacgataccgccttctactacttcatagaactgtactttatcccgtctgaaataggcgaaaatattaaaaagcatatataggaaaatgatcccgaaaatgatcacgcccacatttagattatgaggtcttctgtaagggattatcttcctgttcttcttttttgacatggaaccaggactctcctttaaaactatgatgttggggtcaaaaggtattttgccccctatgataccaagttcaaaaatcctcctgcaaacaagcttgcatcggatttgcgaccttttgaccctggtatcattcaaaaaaagactaccttccgcacaaggcatacggttgacccttgtgcggcaggcagcctttctgctcctgtctgttattctatcacagaatatgtatcattacaatgaaataattacatcacctttcgcgcactctggaagctcatctgcatccatagagatgctcagaacaaaggttacatgatatttatcactgatttttttcaaagtctcataggtttcggtgatatctgcaccctccagtgcggacagttttaagaagctgtccaggtacatggtttcaaggtcatgatcctgggaaataattccacagataaatcctaaaaatccttcagcggatgcaactggaaattcatttacattgataagacggatacggttgttcagctcatacatgtgctgagcactcttatcaagatatacgactgttccgttagcccctttaatagctgcattagccatatctaacagatgttttgttttgcctttacccttttttcctgcaataatctgaaccatagcgatctcctccttgagttatatatgttgtataaaaaatcaattgagattatcttgattatagtataaattcatgcaaaacgcaatcactatttgacaattttagaaattatatttgtcatattgtcatataaatgaggtcggctgtcagattttagtacaacagatataaattctctgtcagaatcgtctttttcagccatgatcagacaatatccggctgctttggtagtaccggtctttccggaaaatacagtaaggccatctggcgtctcctgctctcctgtaagataccagtttccgcctctccaggtctttgaaacgctttgtcctgctccattggtataattggcagtataagcagtggaacctgttacagtacggaattccggatattttaaagcctcattaaaaataaggtacagatcatatgcagttgtataatgatcctcatcatgaagaccatgtggattcataaaatgagtatccgtagctccaaggcgctttgcctcttcattcatcatatcggcaaaagcatcaatgcttcctgccatatggatagcaatagccgctccggcatcatttccggaaggaagcatcagtccataaagcagctgctctaaagtaagggtatcacccggcttgataccgcataaggtagctcctgactcagagatcacagcatcctctgttacagtaacctggtcctctaaattgccgtatttaatggcgatcagggatgtcattactttcgtaatgctggccgggtacattttttcaaaagcatctttactgtaaaggacctcacggtctgtaaggtcaaaaagagctccggcctgtgaagttacatcttccggatcaaaagaaccttcatcggagataacacacagatccgaagcaaatccctttgctgcctcatcttcagcagcaaaagaagcctcaatggaaggaacccgttccttcagtgaatatgcgtctttcaggccgacggaacagccggaaagacacagggaaccggacaggatcagtccggcggctaaagccgaaaaacggcatcttttcattatcgtactacctctctccactccatatcgcctctgtcaagtgccttgatcagaagttctgcagtagccagattcgtagccagagggatattgtaggtatcgcacaggcgtactacgtcgtttacatctggttcatgtgtttttggagttaaaggatcacgcagaaaaataaccagatccatctggttgtgttcgatctgcgctgccatctgctgggttccgcctaagtggccagccaggtatttatggatatttaagttggcaacctcctcgatcagtcttccggtggtgccggttgcatacagtgtatgcttgcttaaaatacctctgtaagcgatacagaaattctgcatcagtttcttctttgcatcatgtgcgatcagtcctattgtcatatctataaccctccttggatcaataatgtcgtggtactctctgaagacctgcgtttagcaccagtcccataccaataaaaatactgataagcgaactgcttccgtaactgataaacggaaggggaagtccggtattagggaaaatgccggttgcaactgcaatatttgcaaagccctgaaaagcgatcagggtggccatacctgtacagatcagtcttcctgccaggtcttttgctctggctgccatcataaggcactcataaacgatcagcaaaaacagaatgatcacgatcacacagccaataaaaccaagttcttcaccgatcacggcaaagataaagtctgtctgctcttctgaaaggaaatttccgtttttaacagaggcgatcgttgtattaaacagtcccttaccttttaactgtccggagccaatggcgatgatggagttattctgctggtaacgtgcttccccgtatctgtcaggatagaaccatgctaaaattctgcctgcctgatactctttgataaaaggaatcagaccgtgtaaaagcagatagacacaggttcccaccatagggatggttacagctaaaactcccacgatccaccggtagctgatgcctgctgaaaagacgattcccagcacgatcaccagtgtaaccaggcaggtagaaaggtttggctgctcaaaaatgagcatagccggtactgcaaaaagcgctgctgcaatggcaactgtgcttacattatttattttttcctgatatttcataaaataccaggaaaaagtaataatcagaccaatttttacaaattcggaaggctgaagctgtccaagtaccggaacttcgatccagcgttttgcgttgttgacagatttgccccagatcagtactgcgatcagactgcagatacacagcagataaatgatcgtactgaagtttaatatcttatggtaatcgatcagagaaagacaaatggcgatcacaagacctaccataacacccatcagctgtttggtaacaaaatcaggatccttattggtagcactgcgtactaccaggacgccgatcacattcagggcgatcatataggccataagacgaaagttataatttctaaagtcgtaatcaaaaaacatattagtatagccccttgctggacatggaccgtatcggtatatccgcacggagtacaggcaggtgatggatctgaccatctgaaaaactgcctgcatccatggtaagacgcactgcgtctttttctatcttcatgtatttggaaatgacacggatcatgtcattttttatcgctgctatcatctccggtgaacatcctgctttatcagataaaagaagaaaggtaagccggagctttgcggtatctttggaacaccgtaatctcaactgccatcaccccttatgcccttcttaagatcctggaaatttttgccaggataccggctgtttctcccggagactccatgggaacattctgtccaagcaggcgtctgcatacatttaaataagcctgtcctgcggcagatcccatacccactaaaggttctccctggtttgtggagaccacgatgttttcgtcatcgggaatggctccgatcatattcaccgccaggatatcctgtacatcggttaatgacatcatatctccccggcgtaccatatctgcacggatcctgtttacgatcaggtcaatggcaccgatctgggcgtgttctaacagaccaatgatacggtctgcatcccggatcgccgaaacttcaggtgtggtgactaccagtgcccggtctgcaccggcaatggcattgtaaaaaccctgctcaatgcctgcgggacaatccaacaggatatagtcgaaatcgtctttcaggtcatcggtgagtttgatcatctgctcaggtgtcacagctgacttatctcttgtctgtgcagctggcagaaggtaaaggtttggatatcttttgtctcttatcagggcctgcttcatacggcagtttccttctgcaacgtctaccagattgtagacaatgcggttttccagtcccataactacgtccaggtttctaaggccgatatctgtatcgatcagaacgaccctttttcccagaacagccagtcctgttcccacatttgcagaagtagtggttttacctaccccgccttttccagaagtaatcacaatgacttcactcataggaacctcctgaaaaattgagtttatattactttaccaatttattgtacattaaattgcgcaaatttaccagtatttttttgagttcaaccaaaaattcacctataaatccagtaggctgctgaaaaatggtttctttaaaggaagaacttttaattctccattctctacagaagcgatcatggttccttttcccagtttgtggttcttttcattaaaccggctggtgtgatttccgatgcgcagctgcaggggagacatggaaaaggcaagaatcactgcctggtcatttcccgctgcaccggctgtaacggttccctttagttctcctaagatgatcacatttcccttggctgttaccctggcgccatgttccacatcaccgatgatcacaatgctggcttctgactccagggtatctcctctttttaaggttccccggtaaaactggccggtctgtgcacttaattccattaatttttcatttagtgccttttcacagcgttcgatccgctctgcatctgtatctaacaggcagaggatctgaagctgtgagttctctgtaattgtatttacgatctgaaattcttcttcggcggacagaggccttccttccagagtcagtgtcatctgggcatttccccagaaacgggcactgtctccaaacttttttgcaatactggcaagaaggtccggaaacggcaggtcgggatttaggatcaccgtcatacccgccttgctgcttttaataacgattccatcctgcatagaaacattcacctctttttaatctccaacagttacatttgatacactggaagcaccggagcccaaaacctgctccagacttgtatatccgtagtaatattcatagactttttttccaagggtagctgcgttggtacctgcgtatccataaggaatatttacagtcacagcgatctccggattgctgtaaggtgcaaaggatacgaagaatgcatggtttgcgcggctgcggtcctcctgtgcagtaccggtctttccggctacttctacaggacttcctgcaaatacagattttgcggaaccgtcggtaacaacccgccggatacctgcctgtactgcatcccaggtactgtctgccgcatccacatgggagctgacagaaggagtataatctgtgatcagatttccatctgaatcagtcagtttatctaaaagacttaactcaaatacagttcccctgtttgcaacagcagcgatataacgggaaagctgtacattgttataggagttggtaccctgtcccattgcagaacgttccgggtcctctgtagtaaggtgtggttctgtttccggcagttctacaccggaggtatggtccaagccaaacatgctggcatatttacgaatcgtggaaagtcccttttccggtgaataggttccgtcagctgtcatacttaagcggtgtccaagttctgcaaatactacgttacaggagttctggatacctgcgatgatatcttcggtgccatgtctgcctggatagatccagcagttgatcggcggatttgcctggtcatatacaccggtacagtcaatagtatcagaaagggagatcactccttcttccagtgcagcaatagctgtgatcggtttgaaagtagaccccggagccttgatagcctgggtagcgttgttgtaaagcggattggacatatcgctttgcagttttgcaaagtaagctgcatctacgcttccggacatacggttattatcataacttggataagaaaccagggcacggatttctcctgtcttaacatctgttacaacacagcctgctgtacagggatcaagcgccagctgggccggtgtcagctccaaatccgcgatcttatttttgataaaattataagtgtaagcactgtctcctgttgcaagtccggcacgggcctgtggatcatcccgtaaaacgccctgtgcaaataatgcaaggcacagctggcttcctgtgatcacattatcattgaccaggtagcggaacatacgcttggtaaagtttttatcatcctgaagctgggcaatgatataatctactaactggctgtaaatatcatctgcattggaatatttactggaagctgccagcctggtggtatctacccagtttcctgcaataccgctgtaaatatagtccctcaggctgatggtgccagctttccaggcctgatactcctgggaattctggtcgatcttatctctctggacaatgccggagttatctgaggaaaggaaactgtaaatatagttcatatagcttgccatatcctttggaagatcattcatggcagccgcatggtcacttaaaagttctccccttatagcagttaagatctgatccctggaagctgtgtaggtgcggtagatctgcttttcaatatcggaagcattctctcctgccatggcatccaaagaaagcacgttgttattgatcagctgataataagcattctttacaggaattggctttttggaaccatctcttacagtggccggatcaatatcttcgtttacaaggaatttggtaatgataccggctaactgctgctcgatcagattataggtagcgatctgcagatccctgtcaatggtcaggtaaacgtcatttcctgcctgtgcatcctgctgctcaatgatctctctcgggcgtcccatgttatctacatacatacgggtatagcctttttcaccctgaagatctaattccatggatttttcaatgccaatacgtcctacaatatcattaaggtcatacttgtcgaccccattgactgcatcgctcttctgtccttccttggaactgttccactcttcgtttaagctgtcgatctggtcttcctggacttttcctgtataaccgatgatcggagcaaaatacagactgtcattgtatacacggatagatgatggttcaatggaaacaccctttaaatcagccgcattttcattgatctccgtcatagtctcctggctgatattggtggcaacggtggtactctcgtatttctggaaccgggtcagctccatggtatagatgatattgatcatatcaagggccgtctggtcagaaagttccattggatttccgtccgcatctttcatatctgccagtttatagccctgacgggaggaacccttctttaattcaaaggcttcccttgcagtaatgttggaagggtattttcctgtatcatcatctaactgctgagaagaaataccgtaaaaattcagaagaaaacgttttttagcagcattggaagtactggtaaaatagggctgtccattttcatctaaggcgatctccagctttccgtcgatcttttccccacggcgttccaggatcgtcacaagacggtagatcatggcattgcggtcagctgcctttggataatctcccaggtcctgaatggcaactgcataagccagctgattataagccagcagatttccattacggtcataaatattacctctggtaccgggagtggtcaccagtttttctgttcgctgcatataactttcctgataggaactgccgtctaagatctgcatccggaacagtttacagatcagacctataaacataagagtaaatataacagccagggcaaagaggcgtgaagtaatcacttttttaagaaattccctggtcacttccagcaattcattaaacaatggtcgtatctctcctttttccaatatcttccagtcttctgctggctgaaaggaacagccggtatactaaaagggtggtcactgcagtaaatatgatctccggcagcatgatctttaaaaagtaatacggaagatttaaacgtccgcggatcaggaagcggaatacataaatgtataagctgtaccacaaaccatttaaaacacttaagatcagaggaagggtgatataatcctcataataatatttggtaaaaataccgttgaaataaccaatgtatacgtagatcagcgtataaaagccaaatggcccgctgtagaaaagatccagcagcagaccagataaaaagccgtaaaacatgcctgcgttccgtccgtggataaacccgaaggaaaaggtaaggatcagaagcaggttgggtgttgccgccagaaaaggcagcagggggaatacgcagttctgcacagtaaaagccaggaggatcaaaagtatatttaagaggatctgtttgatttttccgttattcactattctaccgcctcatcactgtttttaagatctgttaagatcagaacttcctgaagattgtcaaaatccgcagccgggatcagataaccggactgggtcagatgatccggatcaatggatacatccactgcatagccgatcaggatacccggaagatatttggtactgatattggaagtaatgatctggtctccgtttctaagcactgcgtccctggaaaaatctgtaagttttaatcttccctgttcataaagggtcaggtcaccagcaacaatacagttataggaagagtccagtgacatagcgcctacacggctggaatcatcgataatggaacggaccgtagcataattggcacctacgtctgttacgatacctaccagaccaccgtctgctactacgttcatatccacagcaaccccgtcagaggatcctttattgatacggaacacctggaaccatttttcagagtctctggcgatcactcttgcgccgatcttgttgtactgcatgtactcctggtctaacttgtacagctggcgcaggcggtttaactcaaactgctctgcctgaagcctgttattgtcttctgtaagctgggcaacctgggttttcaggttttcattttctgccagggcagcttttaattttccataatcggtaagttcattgtaaagaccggtacctactttattgacaccggactgtatagggatcagaaagtatcccacgccagtacggagcggttccataataccatcttttaaagaagtgataccaataagcaggatacagaaggctgtaagacctgccagtatatatttgctgcgatttgattccatggatatctgttttcctttacatgtataactaaatgatctgctgctgacgaaagcttaaaaaacgcttatccccgataataatatggtccaaaagagaaatacctattacattgcctgcctcctgtaccctgcgggtaagaaggatatctgactcactgggagaaggatccccgctgggatgattatggaccaggatcatgctcactgccaggcagcggagcccctcgatcaaaatctccctgggcgtaaccacagaagcattgactgtgccttttgagaccagaaggtcccggatcagattctgctttgtatttaagaacatgacccggatctcctcctgctctaaatggcgcatatcttccatataatagtctgcaatctgctccggatgagtaaaggaaaccggtgtttccctggctttgcagttccagatccgcctggaaagttcaccgatgcacataagctgggcaccttttacctttcccacgcctttgatgcggcagtaatcttccagggaatgatgcaaaagccccagcagccggttttcctgcccttccaaagacaggatctgtctggcaagctccagggaagtttcctctctgcttccggtgcgtatgataacagctaaaagttctgcgtctgtcagggaagtggcacctgactcaaggcatttctcataaggcctgtcttcttttggaagttgtttcattgttaatttctgcatatgctctcctcctgtaaaaggcacctctccaagtacgcaaagcagaaggatttcacttatcgtaaactcacgaatcccgcacttacgtgctctattgcctgcttacgcaggcgattcgttcgttaatggtttgcgaaaagcaaatgtctgcttacgcagccgcttgtttttcgctgcacacattaaatcatacgataaatgatcagggcaatggcaatgccgataatacttgccatagtgatcttgatggtaagtcccagagtaatgaccagtatgccaaagttaatgactaaaggtgaatcaagaccaaatgactggccaaaattcaaccagctcagccatgaaatgccgttggcaagctgtcccataaagcctcctaatacaatgcctgcaagtaacatgatcagaaggatccagaaattcttacgtcccataaacactctccttaagttatcagtttaccataagttgtttttcatgtcatcttaagtttttcaaaactccatcgtctaaaagctgttgtaaagacttaagaattcccagttttgcatggtaccaggtaagtccgccctggaagtaaacggcatatggaggcttaataggaccatcagcacttaattcaatggaagatccctggacaaatgcacccgcagccataatgacctgactgtcataacctggcatatcccatggctctggtgttacaaagctgtctacaggagcagctgcctgaattcctttgcagaaagagatcacaccctgggcagaaccgaaggtgatcgcctggataatatcgtgacgggattcactgccatttggaacaacgccgtatcccagtctttcgtatacattagctgcaaagatcgcaccctttaaggcacctgcaactacagtcggggataagaaaaatccctgatacagctgctggtttaaaccaaggcttgcgcctacttcttttccaaggcctggagcgcttaaacggtaagatgcacggtctacgcactctttctttcctgcaatatagccgccgataggagcaaggccgcctcccgggtttttgatcagggaacctacgatcatatcagctccaacatcggtaggttcaatggtctctacaaattcaccatagcagttatctaccatacagataacttccggtttaatcttctttacaaaagcgatcagctcgccgatctgttttacagaaaaagtaggacgaggatcataacctttggaacgctggatggtcactaattttgtcttttcattaatggcttttgcgatattttcataatcaaaggtgccatccggcagaagatctacctggcggtagcttacgccgtattcttttaaagaacctacggagtcgcggataccgatgacttcttccaaagtatcatatggcttgccaacaggggaaagcagttcatctcccggacgtaagtttccggataatgcaatgtgaagggcatgggttccggagatcagctgaggacgtaccagggcgctttcagcatggaaaacactggcataaacatcctctaatgtatcacggccaaggtcattgtaaccataaccggtggttgcagcgaaatggatatcgctgactttattatcctgcattccttttaagacctttaactggttgtattctgcagtctggtcgatccgctcaaaacgctccttcagacttttttctatatctgcggcataatcaagaacttctttgctgatacccagctgttcatacataccgtctaaaacattctgttccattatgtgataactcctatctttattaaattgctcttttttcggtttgctattttagcacgatttctgcctgttcgcaatcctttaatatatctgcaaggataaggtctgtatttccctgatactggtctaagtccagccagcgcacatccttttccctgcgaaaccatgtaagctgccgcttggcaaaatgtctggtatcccgtttcaggatatatacggcttcttctaacgtgcagccaccatccagataatcaaggatctccttatatccaagcccctgcatggaagtctgtcccctgtgacagcccatatcttttaatttctttacttcatctaccagaccgttttccatcataatatccacacgccgatcaatgcgctcgtataaaactttgcggtccctggtgagaacatagtataagaaattatagggagagtctttctggtgcatttcttcgttgtgctgtgagattttttctcctgtctgtttgaaatattcaattgcacggatcacacgctttatattgtttgcatggatctgtgcagcagcttccggatccacttcctgcagtttttgatgaaggacctgaggcgcattctcacccagtttttctgccagctgttctaactcttcacgaacaggatttttctcatcattttctttaaaatcaatatcataaagcagagcctggatataaaatcctgtgcctccggtaatgatcgggactttgttgtgagaataaatctcattcattgcctgtttggccattgtctggaatgttactacattaaaatcgtcctgaggatctaaaacgtcgatgagataatgaggaattccctccatttcttctttcgttacctttgcagaaccaatatccatatggcggtatacctgcatggagtctgcgctgatgatctctcctcctactgcttttgcaagttcaatcgaaagagcggtttttcctacagccgtaggtcctgtaaggatgataagaggctgttttactgatgtcatggtctctcctttatacaatgcgcttaaatttcttttccagttcgtaacggctcatggagatgatggtggggcgtccatgagggcaggcatagggattgtccagctttaacagctgatcgatcagttcatttgcttccatggcggataagtggttgccgccttttacagctgctttgcaggacatggaagcaatcttttcataaatactgtccgggttgtgagctgcgatctcatcggaaagaccatcgatcatttccagaagaagttctttctttgcaatggaaaacaggttggcaggtactgcacggactgcaaattcacgaccgccaaatggctcgatttcaaaaccgatccttgtaaaatattccatatacttatttaaaagaagttcctcatttggatttaaagtcaggatgatcggcggctccaccatctgggagctgtagtccctgtcttttaagctttttactgtcttttcatagagaactttttcatgggccgcatgctggtcgatgatatataaatgatcgttgtattcgatcagccagtaagtgtcaaataattgaccgatcagcttgtgtttcagacgggacgccggatccaagagtttttctccgaaaaagtccagctgcttgggagctgtaactggtctggtatcagaaaccggttttgaactgtcagggacagtattgctatctttttctttctctgtttcagatgcagaaaccgggatcttgctgccgtttgcaggctgcaaaaaagccttccggttctcttcttctgcttttttcctctcctttaaccagtctggcatcatatccgaaatatccggttcttttaccaaagacggtttaggcggtgcgatctggcggtagctgacagtatttaaagctgccgcacttttttcaccagggcgctctccctgatgctccaaaacatccttcctctttgtctcaaaaggttccggccttggagcttttttctcctcaaagcgcttaacatcccgctcttctttttcgtttaagttcacatccgggatcagttccttatgagctaaggcattcgccactgcattcatagcctggttgtaaataaactccccatcgctgaaacgaagttccattttcgtaggatgtacatttacatccagtgtctggggatcgatctggaaatgcagcatggtaaaaggatatttgtgctgcatcataaatggcttgtaggcctcttcaatggcttttgaaaggatattgctgcgcacataccggccattgacaaaataattttcataattccggttagaacgggcaattaccggctttccaatatatccggtgatcgtaacacccgggcagctggcggaaacctctaacagattggctgtgatctcacggccaaatactgtatagatcagatctttcaggttattatttccggacgtatacagcttgttctggttgttctggataaaacggatggagatatccggatgagataaggcaatcttttccacaaccgatgccacatgagttccttctgtaacaggtgtctttaaaaacttctttctggctggtgtattaaaaaacagatttcttgcaatgatggtcgttccttccggagctccgatctcttccaggctcttttctcttccaccttcgatctgatatctggtacctgtaagggtctgggttgtttttgagatcagttccacctgagatacagctgcaatacttgcaagagcctctccgcgaaagcctaaagatccaatggtcatcaggtcatctactgtatggatcttgctggttgcatgccttaaaaacgcagtggcaacctgatcttttggaataccacagccattgtctgtaatacggatcaggctgcacccgccgtcacggatctccacggttacagctgttgcctgggcatcaatggcattttccagaagctcttttacaacagaagccgggcgttcgatcacttccccggcagcgatcttgttgatcgtagtctcatctaaaacagagatggtaggcatgatttccatcctttctgtggaatattttccctggatctttccattacagatctttctgctacagatccatcagaccatccagtatatgtacggtcatttcaccagcttctatatccacatttaaaatacagtctttgatcgcaggcaaaagaagctccttgccatttggcagagccactacatatacgtcattggcgcctgtttccagtacatcttttacagttcctacttctgctcctgtatcatcctttaccagaaggccgatcaggtctgtgataaagtactcatccggctgtaaggtaacagcctgttctctggtgatcagaagatctttctgtcgccaggtctctacgtcattgatattgtcatatcctttaaatttcaggatgaccatatttttgaagaattttacctgttcgatctctaacgtagtctgtccctttcctgtgtccaggatcactgtcttcagctttttaaagcgctttgcatcgtccgtggtaggaaaaacctttacttcgcctcttacaccgtgggtagaggtgatcacacctacacgcagcatgttttccataaataaaattcctttctatgaacatatgaaaactatgaaaaaagggctgccgcaaaatggctaagcctattctgcgacaaccctcctctttttactgaatttctacgattactttcttatcttccttagaggcagcggccttgactacggaacggattgcttttgcgatcctgccttgcttgccaatgaccttgcccatatcggcaggagctaccttaagttcgatcagtgtgtcgtcaccctttagtgattcactgactactacctcttcagggttatcgactaatgctttcgcaatcacttcgactaattccttcatctctccacctcttttgattaaagattactggatgccagcgatctttaacagctttcctacagtttcggttggctgagcgccgttagctaaccacttcttggtagcttcttcgtcaaacttgattacgctaggatccttggtggaatcatagtatccaacttcttcgataaatcttccgtctcttggggatctggaatctgaaactacgattctataaaaaggagccttcttctgtcccattcttcttaatctcatctttactgccattgttacatacctccgtaaaataatcttttctatttgttttcgttttttatattagacatacaggagcacctgtctgactatcaatgtttgccagaagcttaaaatggaagcttcatcttgccgcccataaggccgcctaaaccgcccaggcctttcatgcctttgcgcttgccgccgcccataaggcccggcatctgtttcatcattttcttcatctggtcaaactgttttaccagacggtttacttcgccaatgtccacaccagcgccttttgcaatacgctgcttgcgggaaggattcataagtcccggattggcccgctcttcttttgtcatggaaaggataatagactctacacggtgcatggaacgctcgccttcatccatatctacaccagctaactggcttcccacaccaggcatcatggaaaggatacttcccataccacccattttcttgatctgctgcatctgggaaaggaaatcgttgtaatcgaattccgccttgcgcagcttctgggataactctttggcctgttcttcatctacctgggcagcagccttctcgatcagagactggatatcgcccattccaagaattcttgaagccatgcggtccggataaaactgctccagatcagagagcttctcacccataccaatgtataaaataggttttccggtgactgaacgaatggagagggctgcaccgcctcgggtatcgccatccaacttcgtaagaataacaccgtcaataccgatcttatcgttaaatgttccggaaacattgactgcatcctgaccagtcatggcatcaactaccagaatggtctgatatacatttaccgtttccttgatctgctccagctcttccatcatgccttcgtcaatatgaagacgaccggctgtatccaggatcactacattgaagccatttttagaagcatgttctacagcggcttttgcaatgtccaccgggctgatcttatcgcccatggaaaatacaggaacatctaccttttcaccattgatctgcagctgtttgatcgcagccggacgatatacgtcacaggcaactaaaagaggtttctttccttttgcttttaacttagcagcgatctttgctgtagttgtggttttaccggcaccctgaagacctgccatcataatgactgtgatctcatttcccggttttaaggctatttctgtggtttcagagcccatcagctttaccagttcttcggttacgatcttgataaccgtctgtcctggtgtcaggcttccgaatacctcttcccctacggctctttcctgaatggaactgatgaactgcttcactactttgaagcttacatctgcttccaggagtgccattttaacttcctttaaggcagcttttacatctgcttcagaaagtcggcctttgccccgcaggtttttgaaaatattctgcaatttgtcggataagctttcaaaagccattcataacctcctaaagtgtggctgtaatctcaccggataatttccggatctggtcgatcagagccatatctctggtttttgcacaggtatctgccagatcatctaactcccggatcatctcccggatcttcatgaacttggctaccagctgcagttttgtttcatattcttccagtatcttgtcgcaccgctttttcagatcgtgaacgctctgacggctgatcccctgctcctttgcaatctcgctgggagaaagatcatttaacaccatgtcttcatagatacggcgctgatgttccgtcagcagttcaccatagaaatcgtacaacagaccctgttcaacgatcttttccatttcaaccacctgtgctatcatacacgatggcggaaagaatgtcaagtatttttacttgacgtttttataaatattaatgatctcttttatatcttctctgtcaaggaccagattttcagccagagggttgataacgatgttatcaccaccggttgcgcggatggcatcagccatggaaaatacaacacagccccagtcattgcgcttataagccttttcaaattccatccagtcagtaaacagcggaaggaaggcttttttctgcttgtttgtaattcttggaaggatcagtccctgtccctgctctgcacttaagctgttctgtccaacatttaagtcaccgttgtatttaacaggaaccagtaatttgctctttaccagttcatttaatacagcgttcttctttgcagcgatcttctcctcccgttccggataagatacaggccatcttacttctcctaacaagtctgccatttcaaagcgcagagccggattggatacaggaaccggaagctctgctcctttttcctcagatggatcctctaagaagtcagaacggttcatcaacagctgataggagccgttattaataagaagtttttccattccaaggtagtaaagccatgcaaacaggctgatccgtcctggaagtccggaattcttctttggaacttcttttaagatcagggacttgtggtactggttctcatagaaatgaagggcatgctttgccaggatctcctcagagtaaacatcaacggttccttcaatgatataaggaagtccggtacccttatctaagagaatataaagagaagaagacatctttaacttctcaacaaccgcatcataaagcagctgtcctttttcattgtaatccggcatttctgcctgctcattcatctgctgtaaacggcagatcatgaaaatgcactcttttacagaaagcggaaccagtaatgcctcggaaagagttccttctcctgcaaccagggcagaaagctcatcctctctcttttttggcagaagggcagccaggttttcatctctctctcctgctttttttacagcttccaggtcattttcattttcctctggtacgccctgaagatcctccatggtaaggccggagatcctgttaaaatcgatcacctttggtgcaggtgttgccttaaaagcaggctcttctgtctcactgacaacctctaacagctcatctgtaacaggtactaacacagctcccttcggaacgtcctcttttacagcaccgtctaatttaaagccgtaatgagggccataggttcccttcatatcagcagaagccattttcattaactgggttccctgttcgattcccttgatcacgcagtggaaagcaggctttccttcgctgtccaagcagatggctgcagtaccgggagtcacctttccttctgtcatcttacctgtgacaactacgctttttccttcttttaatgcataaacttcgtctacagcaaatgaaaatccatctgcctgtgtttttttatttgaaaataatcccattgtttcctcctaaaatcgggcatgatatgaagattatacaacagcccggcttaaatgaaaagccttttataccaggaaagaagctgcaatggccttgataccttccggattttttgcaaaccatgtgtcaaaatccattccgctgtcgcttacagcatgtcctaaggcacataagaaatccgggatctgctcttctaacaaagttcccacttcttctcccatacgctcctggccctggatatcactgccgttgatataaaggttaaaggcaggttttaatactttatcaatggtctttgcaccgcctctgaagccgatcacaccgatctgatgggtaccgcaggaagacgggcagccggaaatatggatctttggcaggataccgtcagcaaactgctcgtttctttccatttctactaatttctgtaaaagtccctgggagtcacggataccctgctgacatacatgggcaccgatacaggctactgactcctcaaaaatcgtcttcgcactgtcttctgttacatgtaaaacagcttctaagtcttcttcccggcagttgatcacatagaaggactcatccggacagaggcgaagttctgcacctgggatctcacagatagccttgtataagtttacaaataaagatggatctggtgttccgcctaccggatggcagtgtacactgtaaagccctggctgtttctgggtatatacccggtttcttccagaatttgtaaatacagccgttgaagcatcacagccagcctctgcctcacagcccacttcagcctcaggaagcgttaaagtcaggttctttcccatttcccgcacttcttttaacttctcccaaaatgcctctttatatttttcagcaccgcctaaagtctgctgcatataccggcttcttgcctttgcacggttctcataattgccgtaggctaaaaacatctggtgcatagcttcaatgtaataaaggatctggtccttttccactttttcagctacctttacaccaaaagcaggattatttccaagaccacctgcactgtaaacatcaaaagtaccgtcttctcttgcagcaaagcccagatcacggaaagttgcgtgggtcaggttagcaggcgtattagaaaaacctacttttaactttcttggaagcttcggtcctttaatataagtcatcaggtaatctgctgcagccagagcccatggaagcacattaaaatattcccctttttcaatgcctgacaacggagaaaccgtcacatttctcgggaaatctccgccaccgcctctggtaacaatgccgcattttaaagcttccacagcaagagtctttacagtcgcctcatccagatcatgaaactgtaaggtctggcaggtcgttaaatgcactctcttaatatgataggtttcaatggcatctgcaataaacttaagctttgccaggtccattacaccgccggacatacgaagacgcagcatacttgcatttccgccacgctgcgcatagcttccaaaaccgccggaaatccccttgtaggttttggcatccatttcccctttgtaaaacttttctgtagcctcgtcaaattctttgtagtcctctttccagtcttctggctggatcttcatctgttccataagtatctctccttttatgcctcttcatccatttctgacgccagatctttcatgcggtccttttcaaacgcctggatggaaatagattttttacttggatttgcaaatacaaaggttttatctacattctccacataattctgaatcttgtcattggtagcgctgataatggcctgaaagcccagtccacggatcagctcaatacagcttgcaaccttttccgcatccatcttggaaaatgcctcgtctaaaataaccaggcggatggacggcctctgccttacagctgatgacaggttaatatgataggcctgtgcaaaacttgcaaggagcgccacatataacgggttctgtccctcaccgccggaatttttgcggatcatacggcttaagccgatccggatcacctcatcctcatttttgatcagctgctgcatgtcaaaagaaagataggtgcggtagtctgcatatttttccatatttttccgtgcttcttctaactgggctgctgtagcattttccggcgggatgaaaatgctgatcagttcgttgatcagatccccataccggttttcatgttccatagagaaaagatccatctggttttccaccccggtctttaaactggcgggattgatctccaatgactcatccatgaacatatcataaaaccgtccgtctgcccctttacaccgaccgatcacaaactggtatttatcctttccaaagtccagacggctgatgatccggtttaactcatccttgcgcaaaagagcgtccttgatggcactgcggatcttgtacataaaatcgtccttaaaatgctccactgccgcttttgcctgcttacctgcctgttccctgtaaacttccaggtcatcacaggaaagccggtttaagatcttgtcatacgctgcattgtcattgctgcttacaggaacattccttcccggataccggcggatgtattcacttctaaggcccattacatgttcctttgcctgaactgccttctgctctaagatctggcacttggacgcataagcctctttttcctggtcaaagcgtggatgatccttatctgccagataagcattcagttcccgttcatgttcctcgtttacaggtacttccttaccctgacctgcagcctctgtttccagctttaagatagtctgtgagaaacgttccagttcatttttcttgtttaggatctgctcctgtaacagatctctctcccgtttctttccgtcactgagctctaaaacagcctgacggtcggcttctaactgctttacatccttctggcgaagcttttccagccgttcagacagtttttgcttttcctttaactgttctttgcgggtgtctatatcctttaaccactggaaatactcctctgtatcctcttttaaggtttccaaagcaaggatcctcttgcagtcctttaacgtttcctctaacggatttctcttttctgaaacctcctccagttccttttcaagaagacggaccctcttgcgcatactgtcttttccaatataggcaagacgggtataattttccggattgatatactggagtcggaaagtatgatataaaagacagtccggggtaataccaatggcattggcctgtaattcctcaatggtattacatttgatcaccttgccaagaagcaggttcatataaggctttaaataagtctcccgtacacttacttcctctgccagggatccctttaaggcatcattgtcatatccggctgctttctccgtatccagcacagcgatattccagaatttcttcttatccagttccctgtaaatagaaagggctgttttcgcgtatttgggagcaaccaccaggtttaacttatttcccccaagataaccttcaatggcattgcgccactggtcgtttttcacttccagaaggtctgccaggatatacacatctacgcctttgcctgtttcctctaaaagacgtctttgcagataagaccttgcctcttccagataagaaggataggctttattacctgcctttaactgttccagttccaattttttcagcttctcagacttctttaattcattgatctggcttactgtctcctgacgcagtttttccgtatcagcagccatggatgccagggaagcttttaaacgttccaaaaccggtctggtaatcgtccgtgtttcaaattcttccaaatcccataatgtctgattagaaacgatttcttcctcttcccacttctttaaagccagcagcgtcttctgccacttggcttcactgtggcctaactgctcgcaaagggcatttaaagaggtaagctgctgctttaattcctcatatccggtagaagcgatccttttaagaagttcatcactatttgcagtcagctccccgatctgctgttccactgactttttggcctcatctaactggagcagatcttctttgccgcgttctgtcttttcgtggagcatacggatcttggacctggtatccagaagatccagtttctttacaaaccagtgatatttctctaacttgtcatggatcaggcgatattccccatatgcatcatggatcgcagtcagcttatcgatctcctggcaggtatcatcgatctttcgctgcatccgtccatactgcataacactttcctgcatgtcctcaatatggatgttctgttccgtacagatatattcctttacaaaatcttccaggcggatgttcatacggaaaggaatggcccgcttaaaaagcaatgggaacttttcgctgtcaagacctcctaaatagctgtcataaaggatcctgcgaaatctctcattatgggaagtggaaaaataatcttccttgctgtaatgttcccttaaatactgttctacttcgctgatggacataggccttgaaggtgtcctgtattcattttcccataaaggacctttgtgccagaagaaacgtctggaaacttcattggaagctgtgtttacatcaaagacaacaccgatacactgatattcttctgtgcaggtctgctgcatttccagtacaatggtagaactgaaattctggttgcgcagataggaaaattcattattttccccgatatttaccataccgcgcagatattcgatcaggctacggtccgagtcatcagcagcagccttgttaaagaagccgcggccgtctgtattggcataaaggaccagctgcaatgcgtcaataaccgtagactttccgcttcctgagtgaccggtaaagaaattgatctccttattcagggaaaggatctttctggaaatataatgccagttgtttaaacagatcctggtaaatgctagaaaaggagaattattcttctgttccatcttcgtttcctccttcctctgccagatcaggctctatacgctctgtatccccattatcaaaatcctgtaaaagggcccgtacatcatcccctaaaaggactacattaatacagggataaatcataaaaggactggagctgttcagatcatctaacagttccaaaggctctatgatctgatattttcttaacaatgctatggtgcgccggatatccgtaggtgcaggctgacgtttaaacagacggtaacctcctaacttctcctggatttctcccagagtcgtataaacatttacactggtggaaacattttccatctgttcgtcatagatcagctttaatgccagaagataaagagtggccagttttggaagtttttctccaagcagatcctctccctgtacataaataatccctaaatggctgttttctgtcagctcgatcccggcaacagccagataatggcggataaaaggaaaatgtttactgatggtgcggtaagctgccgtatactgaagtcgctctgtctttttatcgtatttgcgctccaatacaaaagtctggcgcaaaagcagacggatggagtcggtgatctccttttgctgttcttctgtcaggttgtcaaaataggggatctgccagtcattctgccagttagtttcattctccgggatcagatcagatgtatcattcacgggtattcctccttacaaattggaattcaggataagtataaggaccattctttatgggctttgcatcactttccactgctttataacggcttttggtccgtgtggaatagtcataggcaaggatcagtttttcaaaatcttcgtccgaagatacggtattctgatctactttcatggtgccattttccatatgatcctggatgaaatcttcaatctcccgcctgctgtaacggttctttactttgttgtaatttaagatctcttcttccgaaagttccggcagttccttttcatccggcagctgttttgcaaagtccgttcttgggcggcgctgcttataaagagcttcttctgacaacaggcctgtctgggaaaggttcatacggctgcctaccgcctggatcatatcctcatctccgttattggcggacagacggtttaagagctggatcaccagccctttcatatcgtcttcctgatttaataaatagcccagtcttgttaccgtagcttttacataacgggaatgttccctgtcaatgttggtgatcctgtgctcaatgtcatcaaagccccgttctaactgatccagtttttgaaggatcatagaaggggccattccctctgccatacgtttctgccactgttcatcttcccgcatggagcggatccaggtcttaatatccgtcttataaagataaaaattgtcagaagtctttaagatgtggtactttttattcactacttcctgtacatatccctctaaatggtcttttaaaagctgggaataatccttctgctccagaaggcttccaaaaaaggtatccatattgtggagcagatcctgaagggatttgtttaatttccgcgtattgatgatcgctgtatccaaaaggccgatcccggcgcggctgtcatttttcagggaaaacaggatggcatatacgttctggatatagatctgggtctcatcttcctgttcattggaaagacggtgaaaggcctcgatcatcacagccgcgtagtccggaatgacaatgttcacagtcatagtagaataatcatctactttccgcagccaccctgtttttaacagccagtttaacacacgggttgccggaggttctaactggtcctcctcttcctccagttcatcctgccagatcacataccgcttctgggcaaagtaactgcttaaaagctggatgcacatttctcggctgagaaagtaattgctgtattcatattcctcattgatctttaaaagtgcttctatgtaggtggcgcggttgacggaacggaacaggctccagaaacgttccggtatctcatgcattaaatttgttttcaatctgtattacttcccttccagctggtttttcagataaagaagcgcattggtaacgatgcagccatggtcaacggcaatgccctttgactctaataagtgataggtctcttccttgatcagaggatgaccggaataagtgatctccacctttgcagaaacatcaatgccctgctccttattggttaaagacagctcccacacctctacagatgactggtcttccttttcctctgtgcttaaacgtttcagatccacatccagccactgggcatcttttgcgtcatctgcagcctgtactttcagatctccttctaccaaagccagataggaggtagtaatgatacgccatcttggatcacgctgccattctccccaggtacgcatctggcgcagtggcagtccctttacacaggtctcttcttccagttctctggcagcaccttcactgatgtcctctttcaactctacaaagcctcctggagtcgcccagaaaccgatacttggatgattgctgcgctttaccataagaacctttaatggctgtccccagtgggtcagtttttcttcacatctgactactacaatatcagctgtgttgcacaggctttcatacttggccggattataatgctctaaaaactcctctaaagactgtccagccgggtttttctcacctgtaccataaaatctccttaaatcacttaaaaatgccataaaaatgccctccttcttgtactgctgtacatttatcgcgttttttcttcggtcagcccctttaatatgccagggatatcataagaatttccggtcatatacgggatcactccggcttcacgtaaggctttgccggttaccgggccaatggcgatcactttgacacctgcaggtatctggaaatgctttaaaaatgctttcgcgcctgaggcactgccaaagaccaggtggctgcactgtgaaaggagtgttccgtcagcaagaggcttcccttttacatgatacaacgccaggtctttataaaaaatatcttgtttttccaattctttgctcaaatttacactgccgtctttggaacgtgccaaaagcacatgatctgaaggagtcagaacattaataagagcttctgccaggctttggctgcagtactcttttggcatcagatccgcctgaaagccatgggcttttaaagcctgtctggtggcttctccgatcacggcaaaatgaagactgcataaaagccgcagatccccgttttcctggtttaaaaaccggtcaaagaaaatttccactccgtttacactggtaaagaccagccaggtgaagttttgttttaaaatagctgtaagtgaagagttcggatttgaagagtctggatcttctgaaaactcttctgaaaatgcctccggcaccacttccattttcattacaggaagtgttttggcgccctgggattttaaagcagtttctaaacgggctgtaaaagaagaggtaccggtgatcccgactgtaagcccggataatggcttgtcatcaatcttatcacctgtcatttcttctgatcgcaggtcaaaagctgcggtctcccctacaacaatgatcgcaggtgttttaagacctgccttaaggcttttctcataaatggtttccagtgtacctctgactgtgcgctgactggcaagagagccatcttcgatcacagctgccggtgtatccgggctttttcccccttttataagaccttttgcaatatgctccagattggaaagtcccataagaaagaccaaagttccctcacaggcaccatataaagccagctctgcctctgactgggccccctttaaggtgtgtccggtgatcacatgaaagctgcggcttacatttctgtgtgtgaccggtataccagccagttccggaacagatacgcaggaagtaatacccggcaccagctcccaggggatctctttttcttttaaagccaggatctcttctgaaccacggccgaaaacaaaggagtccccgccttttaagcgaactactttatttccttctaaagccagctgtaccagaagttcattgatctgatcctgtttcatagagtggcagcctgcctgttttcctacataaaaagttttacaacgggaaggaacccaggagagaaattcttttgatgccagatgatcataaaccagggcgtcacagctctctaagatttccttcccctttaaggtaataagacccggatctccaggacctgctcctataagatagacaactccttttttcatatccttttaagtcctttccctgtttcttcgatcattttttcaaggctttctctgtctgtatttcctgtgacacacacatgacggacctttttatcttttaattcgcccggacagcctgcagcctgtatgatcagttttccctcttccattctggcatagacaccaaccggttcgtggcagcctgcattcaagtatgcaagtacccctctttctgcatctaagcagatatgagcgtccgggcagtcaataattgaggcaagttttgcggcaggactgcctgtttttgcctctacggcaagaacgccctgtcctccggcaggaataaaatgtttcggatctaaaggataaaaatggaattcttccccttcacagatccccagtcttgcaagacctgcctgagccagtacaatgccgtcataaagcccttcttttaatttattaagacgggtgtgtacatttccacgaagagtctgaaaaacaggctccgggacgtttgcatttacaggccacacttctttccaacattcttctaagaagcactgtcttctggggctggaggttcctacaataaagcgtggacagacgaaagaagaaaaatctgtatctgcccttgtgaccagcacatctcccggataggctctttctgatacagctgcaatgcacaggccttcttctaagcaggcaggcatatccttggcactgtgtacagccaggtcgatctctccgcttaaaagggcatcttccagctctgatacaaatacgccttttcctccaaatgcctgtaaggggctgatcaggtttttatctcctaatgtatctgatgtaacgatctctgtttcaagtcccggatatgccttttttaaaagatcttcaataatataagtctgttttaaagccagttcgcttttccggcttccgatccgtaatttaagttctgtcatatggttcctcatctgctatgatctcattgatctgttctcttgttaaaggctggtcctgctctgcagcaagagtggccattttcttaaaaacttcttttctcttttgggaagactcaggaaaaagagacaggatctccggacgcaggctgcctaactgctctgcgatttctcctgtatgttccggtatcacctgacggatccgttcttttatgatctgggtaagaacagggcttgcaccgccgctggatatggcaatatttacagggccctcctgaagcatggacggaaagataaaactgcattcatcctttacatctactacattgaccgggatcttcttctgtctgcaataatcggagatctttgcatttaaaacctcgtcagaagaggcagcgatcacaaaatcagcatctgccagatcatcctctacagaaaaaagccgtctgtacagtttcagacggctcccaaaggacggttcctctgccagagcggataacccggcattccattccggggaaacgaccttgatagttgcaccaaaaggaagcaggtcacataccttgcggtatgcaacctttcctcctcctgcaatgacacaaagttttccctcaatatccatatagaaaggaaaatatcccattatctgtcctccccaggtacatcctctttttcatccggatcatccaggtcatcctcatgttcatcttcccatgagtcatattcatcatctggatattcttccggaagatcttctgaatgatcagaaacttcatccccggatccatcatcatcatccggttctgacattgtgcgctctcttaaagcattcttgcgctcatttacaagacgttcaaattcttcctcactgcagcccatatcagccagtctcttgcggcgtttctcacgaagaacacgcatccgttcttcttcctgctttctctggatcataaaccagatcacagcagctgcgatcaggagaaccactacaccagctcctgcagcaatataagttgcttttgtaagtttcagaggttttttctctttgtctgctgtggaagaggttcctgtttttgctgcatcggtagtattctcactgcctgcagtttcgttatctgtaccatcttctgcagataccggtgcagaggctgcctttgtactgtagacccaggcaacaccgatctgacggtcattgtatgtataaataatacgggcaactgcgccttccggatggcttgcagggatctctgtctgaagatatttgtctgcatctgaaaacttggcatcatttggcagggttacaactgccttttcatctaaataaagatcggaaggagaataagtctcatctccaatggtcacaggttcttcccctgttacatagtctgtttcattttctgcaacagatacatttttaaagcgggcaaaaccaaaatccagaatggtctttgtgtcagaataatgggtccgctgggtactctttaaggtaacagccacctgacggcgtccgtcctgctctgcataagtaacaagggtctgacctgccagggaagtataacccgtttttcctgcaactgcgcttggataataattttcgtcactggagtccccggttactactaacttatgttccatggaataagtacggccatttggattgttgatggtcggaggcagtgtagcgctggtggtagaacagatctccagtaaagtaggattgccaaaaacagctgcaccgatctgggccatatcataggcagatgtaagctgttccggatcatttaaaccggacgggtttacaaaatggctttcacggcagcctaaagaagccgctttttcattcatcatatccgcaaaagcttccctgcttccgcctacatgttctgccagagcgttggctgcctgattggaagactgaagaagcatgacataaaggcagtcttttacagagagcacatctccctcttctaactgcagtttgttgccgcttccggactccacgttataaacagcatcatgtgaaaaggtaacctgctcatccatagaggcattttccactactaccaaagcagtcaaaagcttggtaatgctggcaggatattcctgaacatggatattctgggcaaaaagaacggctccggagtccagatccataacaatacctgcttctgactggcagccggtatcaagtggccagtccggttttgcaaacgcacacacagacatggaaaagatactgataacacaggcaagtgccagtataccttttcgtttcagctgttttaacattattttcttcctccatcctgcttttcaaggcgtgtttttaaaagttccagtcctgctaagatcacagcacccaggataaaaaatccaatatggaacgtagaaaaactcataggttgctgaggcacatccagagttgtgggtccctgggtgatggcatatagggaaccgatcattaaaccaaggatcatataaatagtctgggaacggtgctttgccaggcagatcttaatgatcttgataatgctgacaatacccgtaagaactcccagtccgaaaataacaagtaccggaagataagacaggtttaaatgcataaattcgtggatcgcgttgatcaccggcacataaagtccgaagatcaaaagcagtgtggaaccggaaattcccggaagtaccatcgctgtaatggcgatcatggcagcaaaaaacagatacaggcccagacctgctgtcatatgctcaaagtttacagaaataccatttccatttgtagggttaaaataagagatgcagaataccagtgccataccgatcagggtaaaaacaaggcagccagcctttccttttatactggcccactcttcttttactaccaatgggatagcaaacagggtaaggcctaaaaagacagaactgatctcatagatgtgtacctgaaacagagaagaaaggaccataacagaagcaccaaaaccaatgacccatccaattcccagtttaataaggaaaacaagggctgctttgcgctttgcattgtcctttccgatcatatcatttaaagaattgataaattcatcataaaaaccaagtaaaaaagcgatggtgccgccggaaacaccgggaacactgtccgctaatgccatgcagaaacctcgtactgcgtttaaaaacatataattatttcctcctgaaatcactctggttaaaaaagcttagtataccgtcttaaggatagctttctgtgaaccattatacatgaaacaggaggaaattcaagtaaaatgtactttatggaattttatcagtctccctgaagggcgtcatatccttcttcaccggtgcggacttttactacattttccacatcatagacaaagatctttccatcgccgatgtggccggtataaagaacttttttcgcaagggcgatcacatctgccacagggactttgcttactacaacttctaacttgatctttggaaggagggctgcttcttctactttaatacctctgtaataattggtatggcccttctgggttccacagcccataacctgtgtgatcgtcatacctgttaccccaagttctgtcagggcttcttttaaggctacaaaacggctctggttgaagatcataactacctttgtaagttttgcgccggagccatttccggaaatcgttgtttcagactgtgggaaatgttctacaggaacagatttttctacagatacaggtgcagccgaaacagctggcgcgtcttctcttcctgtaaatacaaccggcataaagtctgcataagaacttgccaggttatgttctgttacgtcaagaccctttgtttcctcttctacacttgcgcgaagtccaatggtatgctttaacagattaaatacgatcaccatggtgatggttacccagaggatcacagatacaacacctaaaagctggataccaagcatatggaagccgccgccgtaaaatacaccgttttctttgtcgaaaagaccggttaaaagggttcctacagcaccgcagaagcaatgaacaccaacagcaccgacaggatcatcgatctttaatacctgatctacaaattcaataccaaaaactactacaaaagctgcgatcaggccgataaagaaagcacctgttggagttactacgtcacagccagctgtaactgctaccagaccggctaaggaaccgtttaatgtcatggagatatccggctttttatagcggatccaggtaatgatcatcactgctacggttgctactgctgctgccaggttggttgttacgaaaatgtttcctgcggaatagatggcttcatcactgtccatagctaccgtagaacagccgttaaaaccaaaccagcagaaccagaggataaatacacctaaagcgccaagtgttaagctgtgaccaaggattgctttcggctttccgtctttgtcatactttccaattctcggtcctaagatctttgctccaatgagggctgctacaccgccgcacatatgaaccgctgtggaacctgcaaaatcatggaaacctaactgagccagccagccgccgccccagatccagtgaccggaaataggatatacgattgcgctgatcactgcactgtagatacagtaagaaataaatttggtacgctctgccatggcaccggaaacaatggtggctgctgtggcacagaatacagtctggaagatcagataggcaggaagaggaacacctgccggaaggatggcactgtagtcgcctcttacaaaaggatcaaagccgccgatgaaagcaccgctgccggcaaacatgataccaaaaccagtcagccagtaaaggggagttccaatggcaaaatccataaggttcttcataatgatgttgcctgcgtttttcgcccttgtaaaaccggtctcaaccatggcaaaacctgcctgcatgaaaaataccagtgccgcgcctacaaggacccatattgtgttcactgctgaaaattccataatagtttcctcctcatacttttacatagaatgcaaaaaggcgcattgcccgccggtacctgacgttggcaatgcacctctttgtgctgactgttcttacgtaaaaacagaaaaagcaccgggtattaagcaccggcgctttctatgtggctcattatagtggcctaaaaagagaatgtcaacagaaaattaaatttttgttaataaggcagaaatttttcaaaaactttcccttgcctttgttatttttacagacggctgactttcttccatctgggaagttccgcctcataccgttcattgatccagtctgccccttttgcaattccatctgcatcaaaggtacactctaaaaattgcttttcttcctctggcgtgcagtcaaaactgtacggttccggccagacgctgactctgaggacaggagtttcctctccttctttttcaaacttttccatgcgaaaacgcatgcctttgcagctgccggtatatttttcttttttcaaaaaatttaccggcataaaatctttaagctgaagcataaaacactctcctgcagatctgtttttttatcccagatccattattcgtaataacttaattccattaaattggtaaccacctgggtacactcttcgtcggaaatggcagaggcagtgtatacggtataacgtgtgctgccccaggaccatgaagccagtcttccgccgctttctgtggtctttacctgggcctgtcctgctattttgccagactcccagtttacagccagttcctggtctgtaaaccgctcaaaaatacctgcaaaatcttccgctgtattggaagcgcggtaacagtaggaaacgccgttttcatcaaatgtgatctccgccacttccccgcttatggtataaaacttagtattttccccatctgcaggtgctaccatatggatccccatggactcaaaggactgctcattttccacttcttccattggattgggaatagatgcagtctctgcctcagaaggagcctgcgtactttctgctgctgtggtttcttccggtcctgaagaagcacagccagtaagctggctaagagccagacctgctgcaagacttaaggaaatcagatacgttctttttttcacctggatcatctcctgttattattgtcgttcatttctgaactgtaacttgttatttattagatttacggttgataaactctgtttttgtcttagaataaacaaatttctggctggcatacaggccataatagccggataaagcaaaagctactgcaatggcaatggagaaatattccattccctcataaccaaacagctccaaagcgatcaccagagaagaaatcgggcagttggtcactcccgcaaataaggcagccatagagcaggcagcacataaagacggggcaaaaccggtgatctgtccaaaagcacagccaaaagctgcacctacacataaagtaggaacgatctcaccgcccttaaagcctgcaccaagggcaatcgctgtaaacagcatttttaagaagaaagcctcataaccgatctccccttccatactgcgctcaataagaggcatactgcttccgcagtagtccctagtaccgatcagcagggtaagaaggataaaaatagcactggctgccaggatacgcacatagggatttggaaatattttcctgtaagtgtgctctgcaccatggagcatcaggcagaatacaatgctgacacctgcgcagagggcacttaaaaaaatgatccaaccaacactggaaacgctgatagccggaatagaaagcacggtaaaatgctctcctgcaatgcctaaatatctggcgatccccactccgataaaagaagaaaaaatacagggaaccagggctgcataatacagtacaccgatactgattacttccagcgggaagatagctgctgctaccggtgttccaaaaagtgcagagaacacagcgctcataccgcacataatggcgatctttttatctttttcgtctaaatggatggcatttccaaacaggtttccaaggcttccgcctaactggagggcagctccctcgcggccggaagaaccgcctgcaatgtgggtcagcaccgtagagacaaagatcagcggtcctgtagccagtgttactttttccgtggaagaaatggcatcaatgaccatgttggtgcctctgttgccctcttcatgaaaggtatggtaaagccatacaatgagaataccggaaacaggaaggaaaaataacatatttgggtggttcatgcgaaaagaagtggcaaaactgacacccatagaaaagaggctgccgatcagtccgcctgtaccgccgatcagcagtgcgatcaggctccattttataaaataacgcagattattggcaagggaagcccttgtttcatcagctgaatgattcatttgtatgtatccccctaattattcttacatgccatctgatcatggcatcactataaatgacataagcgtgcctgacttctttttcgtccatcagacacgctttttatgcacacgaaggcttacatttcgctgtaagtacctttaaattttacaagttttggacgatagcctgcgtctgtaagagcagaaacgatctggttcttgtggtcggtaccaaatgcctccatagtgatacgcagctcaacagcagcattacggttgatgctgataaactggttgtgttccagcttgatgatattgccgtgttcttttgcaagaagctctgctacctttgcaagttcacctggtttgtcaggaaggagaacagatacagtgaagactctgtctctctggatcaggccgtgctgaacgatagaggacatggtgatcacatccatatttccgccgcttaagatagaaacgatcttcttcttttcaacatttaagtgctttaaggcagctactgtaagaaggcctgagttttcaacgatcatcttgtggttctctaccatatccaggaaagcaacgatcagttcgctgtcttcaatagtgatgatgtcatctacattctgctggatgtatgggaacagcttttcgccaggacgctttacagcagtaccgtctgcaatggtatttacctgaggaagagttaatacatgtccctcttttaaagactcctgcatgcagttagcgccagcaggctctacaccgatgactttgatctttggatttaacagttttgccagagtggaaacaccggtacaaagaccgccgccgccgattggaactaaaatataatctaccgtaggaagttccttgatgatctccatagcaatagagccctgtccggtagctactgccaggtcatcaaatggatgtacgaaagtatagccatgttcatctgccagcttgtatgcatatgcacaggcttcatcaaatacatcaccagccagaacaacttctgctccgtatcccttggtgcggtttaccttgatcagaggagttgtagtaggcataacaacggttgccttaacaccagacagctttgctgcataggcaacgccctgtgcatggtttcctgcagaagcagtgatcaggccctttgctttttcttcttcagtcagagtgctgatcttgtaataagcacctcttaccttgtaagcgccggtatactgcatgttctccggcttgaaatataccttatttccggtctgtgcggaaaaatattcgctgtagatcagctttgtctccagagtgacctcttttacgatctcagaggcctcttcaaatttctctaatgtgagttcttccatggtagtctttctcctaaaattgattatcatgtataactataacactttatctcattaaattcaagttacagttcagccatgatatttaagattgtacatgaaacagggcgttgacgaaatcatttgcgtcaaatttctgcaggtcatcgatcttttcaccgataccgatatattttacaggaattcccagttcagactggatggcaactgcaataccgccctttgcagtaccgtcaagcttggtaaggatgatacctgtaatatcagctacttccataaactgttttgcctgcgccagcgcattctgtcctgttgttccgtctaaaacaactaaagtctcccggtatgcatccggatattccttatcaatgatgcggttgatcttctttaactcctccatcaggttcttcttgttgtgaagacggcctgctgtatcacagatcagtacatccgcctttctggatttggctgctgctacagcatcatagatcacagctgccgggtcagaaccttcctgctgtgcgataatatcaactcctgctctggcagaccattctgtcagctgctcaattgctgctgcacggaaggtatctgctgctgctaaaatcactttcttgccctggtcctttaactggcctgccagttttcctacagaagtagtctttccaacgccattgacaccgatcaccaggacaacggactttctgttttcaaattcgtaagcattttcacccagatccatctgttctttgatgctgcctatcaggatctccttgcactgctccggatccttgatatgctgctcttttactttatttcgcagatcttctacaatcgccatggtcgtctggatacccaaatcgcccatgatcagggtttcttcgatctcttcatagaaatcgtcatcaatagcggaaaaaccgctgaaaatagagtcaattccagatacaatattgtttcgggtttttgtaagcccttctaccagtcggccaaaaaagcctttctttccttctgccataaggcccctcctttatatttgcctattttgtcaggctgtcttctataagattaacagaaacaagggtggatacgcccttctcctgcatggtaattccgtaaagccggtcagcagccatcatggtgccgcggcggtgggtgatcacaataaactgggtatttttcgtcagtttgtgaagataatttgcaaagcggtctacgttggagtcatctaatgccgcctcgatctcatctaaaagacagaacggggacggtttcaaattctggatggcaaacaacagggaaatagcagtcagtgctttttcaccaccggaaagctgcatcatgttctgaagcttcttgcccggaggctgggcgatgatctgaattcctgcttccaggagatcttccccttccattaattccagggcgccccggccgccaccgaaaagttctttaaatactttgtcaaattctgcacgtatctcccggaatttttcttcaaactgacggcgcatgccaatatccagctcttcaataatcttttccagttctgcctgtgcgtttaccagatcctcatgctgggccctcataaactcatagcgttctgacacttccctgtaatcttcaatagcatttacattgatatttccaagagatttgatctgctcttttaaagcatcgatctgtctgcggatctccggaagggaggataattcctcttttttcagttcttttgcctgatttaaggtcatttcatactcagaccacatataggcagccagactttccaaatgttcttccagcttttccgcctggctctgtacacggaacaggtccttatccaggtcagaaagacgctttgaaatatcttcccttgtctggaacagatttttctgctgtttagagacttcttctttttccagggcagttttctggatctcttcctctagctgatggtcatcttctttgctgctttcaatttccttctggatcgctataatagcagcttctttttcttcaatggcctttctggagtcatttttacctgcttccagagaagcatcttcgtcttttaatttcctgatctcaccgatcacacggttttcattttcactgataaatgaaagctgctgttccaaagctgaagactctaattgtatttttgaaagttccagagaacagttttcccgcagtaacttttcctggttcaacaacaatgatttttcgtcgatctgcttctgggaatttgtatttctctcttccagtctgccttcttctgcctttaaagaagcacggccttctgtaatctcacggacctgctcttccagaagcgcatgttcacggaccagatctgcagaggagtctgcaatctcgtttttcttgtcctctaaagtagagatattgatacggatggtattttcacttaaagccagtttctggatctcatttcttaactgttcagaaatttccttcttttcagcagccgttgcttcctgaaggcttaattcctgctgaatggagtctgtctgttttaaatagccgttgcaggcagtttccagttcttcgatctcacggcgtctgcctaaaagattactggtatttttaaaagcaccacctgtcatggaaccgccggcatttaaaagttctccctctaaggtaacaatacgcaggctgtagtgatactttcttgcaatggcaatggcatgatcaatggtatccgccactaccacccggcctaaaagataccggatcagaccctcatactctttgtctgcctggactaaactgcttgcaagccccagtacccccggttcctttaaagcctccggctttgggaacggagactggttctttcccacactggtaagaggcagaaaagtagcacggccgtatttattcttttttaaatgttcaatcagccgtttggcagtttcttcagagtcagtaacaatattctggatactgccgcctaaggctgtttcaatagctgtttcgtactttttctctgtgctgataatatcagccacaacaccgcggatcccatggatccggtctcttacttccattacccgccggatactgtttccatagccatcatagcgctctgccaggtttcgcaaagactctaattttgtatgggccatgtggtattcctgctgggtgttatttaagtttttatttaaacgctgaacctcttttaaggcggcgttcattccctcttctgcttcttctgctgaaaactgggccttttctaactgttcctgtacctggtctaaagcagccttttcctgaaggatcttttcatcctgtacagattcatcacttttaaagcggagaagtttctgggagacttcgctgcggcgcagatttacctgctctaacatagtctcataatgctgctgtcttgcagtcagatccgccttgtcattcaacgcctggatgatctcacttttcgcctgttcgatctcattttccaactgatagatctggtcatctttttcctgaagctgtgttttggcagcttccaaccgttctcctgcgtcttttacctgtatctgggcatcttcacgttcttttacataggaagccagctgttttccataattttccagatcctgggagatcacatttttacggcttttataatgttcttcattggcctcttctgtatggatctgttcccttaagacattgatctggccttctctggaacttttttccatagctgcttcgcttaaagccgcccggttctttgtaaggacttcatctaaagctgtcagtttttcttccagggtatcatattcttttctcagatcatctgcctttttctgggtctcttccacatccccggcaagaagacgtctgcggttttctacctcttttaactgggaatgggtattttctgtatccagaagaaactgattggcgtcacatacctttaattcttcttttaactgaagatattccctggcagtttttgactgacgttccaaaggtcctacctgtttttccagttctgataaaatatcgctgacacggaccagatttgcctgttcatcctctaatttcttctgggcaatggatttacgccgtttgtatttaacaataccggccgcttcgtcaaacagctctcgtctgtcctccggctttccgcttaagatcttgtcgatctggccctgtccgataatggaataaccttccttaccgatacctgtatcataaaaaagctcattaatatcctttaaacggcaggtgctgccattgatcatatattcactttcaccagagcggtacagacgtctggaaactgtaacctgatcataatcaatagccagctggtgatcggaattgtccagtgtaatggcaacataggcaaagccctgaggctttctaagctctgtaccggaaaagataacgtcctgcatactggcgcctcgcagctgcttaatacgctgttcaccaagcacccagcggactgcatcggcaacattgctctttccacttccgtttgggcctacgataccggtaataccattatgaaattcaaaaagcagtttgttggcaaaggacttaaatccctggatctcaatgctttttagatacatgtttcacccgccttcagttttaagatgccgttgtaggcagctaactgttcagcagccttcttggtacggccctttccacggccgatctcctgatcacctaccagagcgcggacttcaaaggatttgttgtgatccggtccttcttctttcaggatctcgtagcttaattcgccgtcctggcggctctgtatgatctcctgtaagatagtcttgctatcataaaagagctgcttgtgttcaatatcatttaaaatgaacctgtgaatatactcttttgcactagcaaaaccaccgtccagataaatagctccgatcactgcttccatagcatctgatacaacagaatttctgtttcttccgccggttgcgtcttcgcctttgcctaaaaacagatagcttccaaggttgatagcttctgcacagtacgccagggtcggctcgcagacaatgctggctctgatctttgtcagatcaccttccggcttttctgtatatttgtgatagagaaaatcactggtaacgatctcaaggactgcatctcctaaaaattccagacgttcattgcagtgattgtggtctaaacggtgttcattggcataggaactgtgagtcagcgcctgggctaataaatgtttatcctggaaatgataggagatcttctcttccagttcttttaattgctcattcatacgtagtatcctccttacggatataataacacaaaagggctgtttgataacagccctggattcctgttatttagttcagtgcatttttaatctgttcaactgcgtccccaacggtaacgatctgttctgcagcttcatttggaatctcaatgtcgaactcctcttcaattcccatgatgatctggaagatatccagagagtcagcacccaggtcatctacaaatgtagctgccattgtcacatcctccggttcaatgttcaacacttctgcaataattccctgcaatttttcaaattccatttcttagctcctctttcttagatctttattctttcatttcttctgtttttccgtttccaaccgttaaggactctttgatcttttcattgatttcctgttccttaaaagtaacgcattggatgatggagttgcgtacctctgtacgctttgaacttccgtgggtcttgactaccagaccttttaagcctaacaatggcgctccgccgtactggctggcatcaaatgcctttaatgtggtcttcaaagctggttttactaatagagcaccgatcttgcttcttaaggtggccatcatgccctgcttcaccatatggatcagcgtagcacccacaccctcgtaaagcttaaggatcacattgcctgtaaacgcttcacagacgatgacatctgctccgccatgcggaatttcccttgcttcaatactgccaataaagttaatatcaggacaggcttttaaaagcgggaatgtttcttttacaagggcatttcccttttcttcttctgctccgatatttacaatagcgactcttgggttcttaattcccacaacgtgttccatataaatggaacccatctgcgcaaactgtaccagatgagatggtctggcatctacgttggcgccacagtcgatcagcagtgacacgcctttttcagtagggataagcggtgccagcggaggacgttctacgcccttgatcctgcctacgatcacctgtccgcctactaaaatagctccggaacttccagcggatacaaaagcatctgcttctttattctttacaagattcatgcctaccacaatagatgagtccttcttcttacggatcgcattcaccggcggttcttctgtggcaatgacttctgtggcattcaccacctggatctgctctttgttgtaagtatatttggaaagctctttatttactactgcttcctgacctactaaaagcacctggatccctggttttgcgtttaccgcttctacggctcccgcaaccatctcaactggtgccaggtcaccgcccatagcatctacagctactttaatcataaaagactctcctttcggtttcgcaatacagttattaatatactagatgtcgtatcataaatcaatacgtttttatgtgaatttcgccccgcctgataaaggcagcgatcatgttttcttttcaccgcaaaagaggaccctgagattactcccaggatcctctgatcttcgtttttctacagattattcagctgtattaacgatttcgcgcttattgtagcttccgcaagccttgcatactctgtgaggcatcataagggctccgcacttgctgcacttaaccaggtttggtgcgctcatcttccagtttgctctacggctgtctcttctagctttagaagatttattctttggacaaatagacatggtttacacctccttcaactgtttaaaaatatcctggataactgacattcttgggtccagtgacctgttgtcgcagtcacaagtccctcggttgagatttgtgccacatctattgcaaatccccttgcagttatcactgcagagaactctcataggcaggttcagggttaactcattaccaaccagctggtcgacatccagattataaccattaatatagaactgctcatccaaagcttctatgcggtcttccttcgtctgattcatatccagctcctggtcgatctccagttcaaaaggaactaaaacaggctctaagcatctggcacatggcatttcaaggcttaaaacagcctttcctgtcacagtcagtacccgttctccctggttagtgataaccagagtcaccggttctttttccacaactttataagaaccatcaggtcctttaaaatgtgtcatttccagtggaactgtataggttttggatttcccttcaacagggaacagctctgataaattaatcagcatatcgtactccttgatatgcacctatgctattatacataggcgcaccgggtttgtcaacaaaattttccaaaaaaattacttaaccagtcttaaagtctctcttgcgattgccagctcttcgttggttgggatcagcataacttttaccttggaatctggagcagaaataattcttctctctcctcttacattgttagcttcgtcatcgatcttaacgcctaagtagcctaagtattcgcaaacgttctttctggtaaccttatcgttttcaccaacaccagcagtgaatgcgatagcatctacaccgttcatagctgctgtgtaagcacctacgtacttagcaacacggtatacgaatgcatccagagctactgctgccagatggtttccttcttcctttgccttctcgatatcacggaagtcgctggagatgccgccgctcatgcctaaaacaccggacttcttatttaagatgttcagaacttcgtttacgtcttttccttccttgttgcagatgaactgaacaactgcaggatcaacgtcaccacttctggtacccatgatcaggccctcaagaggtgtaagtcccatactggtatctacgcacttgccgccgatggaagcagatacgctggcaccatttcctaagtggcaaacgataacttttgccttttctggatctaagttgccgaacttgatcgcttcgccggatacgaacatatggctggttccgtggaagccataacgacggatactgtatttctcatagtactcatgaggaattgcgtacatataagccttctctggcatagacataccaaatccggtatcccatactgctacgtttggcttaccaggcatagcctgttcacaagcctcgatacccattaagttagctgggttgtgcagaggtcctaagtcgaagcattcacggataactctcttaacatcctcgtttactactacagactcgctgtaaacaacgcctgcgtgcagtacgcggtgtccgatcgcggagatctcatcggtgcttgcgatcacgccgtgatctttgtcctgtaaagcttccataaccatgttgatagctacgatgtggtttggcattgggctttcaacaacatatttgtccttgcctgctggctgatgggtcagcttggaaccttcgataccgattctctcgcaaaggcccttagcaacaacgctttcgttgtccatatcgatcagctggtactttaaggaagagcttccgcagttgataactaaaatcttcataataggtaattctcctgtatatttattttactatgaaaagttccgggcgtcatatacgcataagcgcaggcacccggtaactttttatttatcgcttctaaattagttgttctggcactgtacagctgtgatagctacaacacctacgatatcgtcagcagagcatcctctggacagatcgtttactggcttagcaataccctggcacattgggccgtaagcagctgccttgccaagtctctgaaccagcttgtaaccgatgttaccagcatccaggtctgggaataccagtacgttagcatgtccagcaaccttggaatctggagccttggaagcaccgatctcaggaacgattgcagcgtctaactgcagttcgccgtctaatgctaattctggagccatttccttagctaacttggtagcttctactactttgtctacgtcagcatgctttgcgcttcccttggaagaatgggacagcatagcaacctttggctcatgtcctactaacatcttgaagctctcagcggaagaaacagcgattgctgctaattcttctggagttgggttctggttcagaccgcagtcagcgaatacgaatgtaccgttgtcgccaagatcgcaatccggaacttccattaagaagaatgcggaaactaacttggttcctggtttggtcttaataacctgtaagcaaggtcttaaggtgtttgctgtagaatggcaagcgccggataccataccgtcagcatcgccgttcttgatcattaaacagccatagtaagcgtagtcgcctaagatggtctcttttgccttctcaggagtcatgccttttgcttttcttaactcaacgaagagatcgatatattcctgggtcttctcgtaggtctgtggattgatgatggttgcgccggaaacatctaagcccttgctgtgctcgccgatatcctctggtgtaccgataatgatcaggttagcaagtccttcttttaaaattttctcagcagcttcccatgttctgcggtccatggactctggaagaacgatagtttttttgtctgcttttgctttttctttgataatgtcgattactgccataatcttttttacccctttccttatgttgaagcatataacattattatatacgtagcccccagcggaaacaagctgaatttaacgaaattttgcattttttttcatacttttcgttattttggataagatgcagacatgtttcccaaaaatccccggggtcagatcttttcgtaatgatctacattgatcacaaagatagtagctccgcctacctctacagtcataggcatggtagcatagtttaccatggcagtaccggaaatatacggcatgttcacagtcagtttctggtgctgtccgcattcctgcttgatcagattgatcacttcttctactttttcatcctctacaccgatcatcaaagtggtatttccttttttcaagaagccaccggtggtagacagtctggtcacactgtaatggttctggtttaaaaggcttactacatcatcttcattatcatttcgtacaatggcgtatactaatttcatggttttagtcctccttgctttgttctggtatagacttatgagccctgcacttgcgtgctctgttgcctgctgtcccaggcggcttgttataagtatagcatatttatataaaaacaggcaccgaaatttagctccggtgcctgtttcttaatatttttaacattatttcaacatttctgcctcgtccggggataaatgtttctgtttatgaataaatgtctctttctatggaacgtctctttctatgaacaaatgtctctttctatgaaattatgaattagatgccggtttggttccaagagtgatctgtacttcatgttctacataagaaccatttacaagggactgtactgtcaaagaaaccgtagaaccgccttcgtagtaagtaagcatctgctttaattcttccatattggtaacagactgtccgtcaaacttggtgatgatgtccttttctttcaggtcagaatttgctgctgcaccgccttcaacgatcttgtatacatagataccaaccggcataccgtattccttggaagcattggcatcaatattggttccctgaattccaaggtatccctgtgcgctttcgtcaactgcttctcttgtcttctttgtcatcaggttatttaagatttcctgtgcctttgagatagggatcgcaaagcccatgccttctacttctgtagatgcgttctttgcagcgttgataccgattacattgccatttaagtcaagaagggcaccaccactgttaccagggttgatggctgcatctgtctggatgtaagtatgctggataccattttcatctgtgatctcacggtctaaagcactgatataaccaactgtcagtgactgtccataaccaagtgcattaccaatggcaattacctgctgtcctacctttacattatcagaattgcccagggttgctactttgatcttgctcatagtatcagatgggatatcagaaagctttacagcaatgatcgccaggtctgttgctgagtctgtaccctttacagcagctgctacctgagtgctgtctgtaaaggtaaccttcatatctgtcgcaccggatacaacgtggttgttggtagcgatcagaagttctgtatcattctgtccaacaatgataccagaaccgctgctctgtgcctgataagtctgaggcataccaaagaaattgttctgttccacagtcatggtatcgttgatggctaccagagaaggcattgccttttcagcgatagaagaaacatcggttactgtagatacagcggtcgtacttccgttattggatgcagcgcttgtttccggtacctgtgcagtggtggttccttctgtttctgccggtgcagtagctgttatatcagcaagtcctgtaagacgggcgcctacataattaacacctgtcatcacaccgcctgctactgtgccaaacagcacagctgctgcagtaatacctgctgcctttcttgcccagctgtttttctttcttggtgcctgaacggtttcacggtattcatttctgtaaccatgttccggtctgttattctgctgtttgctctcctgccactgagtttttctctcagaggaagttctttcagaagaacggtttggggtagtccagtttacattctgtgaagaaccggactttctgttttcctgtgaccgggatgaactggtttgagtttcctgctcatctacatcatccataatttctgttctttcgatctcctgatctctatcctctctgttttctctatcttcttcgtacataaaaaacgctcctttcagatgcctttgtatatttcaaatggatttttattttctttttaatttctttctctttccttttgataactacaatataccctctgtttttgatgcaattgtgatgcaattgtgtatattttgtgtcctgatcttaaggcatgctggacgaaccttctgtccgtgggtataatagtaccatgaatacgccattctgtatacacagacttaggacaggagacgaaaataagatgaagataaccggtattgtagctgaatataatccattccataacggacacgcctatcagatcaaaaaagcccgtgaagtaaccggctgtgattactgcatcgccgttataagcggagattttgtacagcggggagaagtggctgttttcagtaaatacctgcgtacaaagatggcacttctgtgcggcgcagacctggtccttgagatcccttccatctttgcagtaagcagtgcagaggactttgcagccggtgcagttgcccttcttgatcagctgggagtggtgacccatctttgttttggcagtgaaatgggagaaagtgaacgttttatggaaacagcggctattcttgcagatgagccggactcattttccacaaaattaaaagaaggactttcagaggggctttcctggcctcaggcaagagtccgggctttagaagcagaaggaatatcggatcttggaaacttcctggaaacgcctaacaatctgctaggtgtagaatactgcaaagccctgatccggcagaaaagtcccatccagccgattactattttacgaaagggaaatggataccacagccaggatcttacaggagaacttgcctccgcttccgctatccgcagagaaatctttaaagaagaaccggatttttccattcttttatcgcaggtgcctgatgaaatacgttctctctttaaggcagaagtccctctgcagccggaagatctgtctgatctgctaaattacagactcctgactttaaagcgggacgggatccctttttctgttttcgcagatgtatcaaacgacctttcagaccgcttggaaagcaaactctatgagcaggcagactgggaagaacggatccggcagttaaaatccaggcaatatacctatacccggatcagccggtgtcttctgcatattcttttaggcattacagatgaactggtccttgcaggaaaagaggccggtttttccccctatgcccggatcctaggttttcgcaaaagcaaagcaggggttttaagcgaaataaaaaagcatacccggatcccgctggtcgcaaagaccgcggatgcatccaggatgctttctggtacagcaaaaatgttatttgaacaggatctgtatgcatctcatgtgcgtcagagcctgcttttaggaaaaacaggacagccggtgcgtaatgagtttacacagcccatctgtattatatgatgataccaggatcaaaaggtcggaaatccgatgcaagcttgcacacagcaattcagtatcagagttccggagccaggagacggacaatggcgggatctgcattcaggaaatggatcagttcccgtatctgctctcctgtttcttttttcttctctccctctgcatccccttcttttcttaacacagcacgcagcagaatatttttcggtgtgtgctccatgtcaataaattccaaaatctgggtattgtaacctctgtattctaaaacctttgcccggatgccatctgtatacaaagctgccatccgttccttaagcaggccatattccaaaacaggctgcagaaccggattgtggatctgacggtttaattcatgctggcagcatggaacagaaaggatcaccttcgctccccagccaactgccttttccagggcataatccgttgccaggtcacaggcatgaagggtaactaccatatctacatgatccaccccttcataagaagcaatatccccacaggtaaagctcagcttctcatatccgtaccgtactgccaggtcagaacaatggcggatcacatcttctttcaggtccagaccgatgatccgtaccggatatccctttacctctttcagataataatacatggcaaaggtaagataggacttaccgcagccaaaatcaatgatcacattttctttgtttttatttaactaaggaagaatatcttctataaattcaaggaaacggttgatctgacggtacttatcatagcggctgtggacaatggcaccttcttttgtcataaccccaagatctaccagaaacggaaccgctgttccttccggtaaaagatactgctttttacggttatgctccaaagcagcctggttgatcatacgggcctgcttcttaaattttacagtcatttttccttttttacttacaagtactgttgccttgcctctggcacaggtgatctcagcctgacggaaaggaccatttaagcagttttctacataaataacagcttcgtctctgcttaaatttttatgaaaagcctgtttgcctttctgctcctctgcctggaagatcagatttcccttcaggagcaaaggacggatctttgactttgaaaaatgatccgggtccgaaggattgcttaaaagaatcctctctaaatccttttcaaggcaaaattccaaagcttcccttaactgtgcatgttcattggatcctaccattgttgtccttttctcctttcagtcttcacctaaaagctttttggaaagctgtaaaagttccccaaactcccggatcactgcctctgccccgtttacctgtccaaaaccataggcagcatggacaaaggggattccggcacctgcagctgcctctgcgtccatggcagtatcgcctacataaaaactttgatctaagtggtttctctggatcaccatggaaatattatctgccttggaaagaccggtatttccataacattcaatatctgtaatatattcttccagattacaggaacgcattaaaacctcaatatagcccttctggcagttgcttacaataaacagtttatatttccagcttaactgctgaagaacttctgctacctgagggtaaagaattcccggatgatcctccagatactggttttcatattccatacaggcttccattacctctaagcgttttgcaggaggcagatccggaaataatgcgtctccgaaatctttcatgttcttgcccatattccggctgatcatatccggagtgatgggtcttggtccatttaacagcttttctgccgctacctgccaggactgggccacctgaacagaagaatcccataaggttccgtctacatcaaaaataattccctttttcatcctttattctccccttttgttatcctttccagccgcttcttaaaagttccggatacttgtctaaatgtgcatggtcattaaaacattccagtgtaaagcgttcattcttttcatcccattgaagttctgtaatactgcagttttccagatcttttccaagaatacggaaacggcttaacggaattcccgtataataagcagccatgacccggatcagcccgccgtgtgttaccactgcgatccgttcatatcctgtttttacaaggccttttaaaacaggatccgcccgttttaccacatcggcagcacactcaccgcccggataagcaagatctgtttccatttttgcctgttccttcttaaaatctgcaaactttacagcaatctcttcatcagaaagaccttccatctccccgaaatcaatttcacgaagttccggacagatggtgtgttccacattccagtataaattagccgcctgggctgtctctacggctcttaacaggtcactggaataaaccgcctggatctttttaggaaaaagccgctcacctaaaagggctgcctgacggtagccctcttcacaaagatcaacattaacattgcacaggcggctgttctgccgcccatgacggatgagatataatttcatacgtatcgagtcctagttcttaaagctgtggatcggagccgggatccgtcctcctcttgtaacaaatttctcacaggagaatgtattaacaggaatgatcggtgcataacctaaaaggccgccaaattctgctgtatctcctactttctttccaatcactgggatcaggcggactgcggtagtcttctggttgaccataccaatggctgcctcatcagcaatgatacctgcaatggtagtagaaggtgtatctcccgggatagcgatcatatcaagacctacagagcatacacaggtcatagcttccagtttttcaatggtaagagcgccaaggcttacagcatcgatcattccctggtcttcactgacaggaataaaggcaccgcttaaaccgcctacataagaagatgccataacgccgcccttcttaacctggtcatttaacatagcaagggctgcagtagttccaggagcgcctacacgctctaagccgatctcttccaggatctcggccacactgtcgcctacagcaggggtcggtgctaaagaaaggtcaatgataccaaatgggatgcccagacgcttggatgcttcctgggctaccagctgtcctacacgggtgatcttaaaggcagtctttttaatggtctcgcagagaacttcaaagttttcgcctcttactttttcaagagccacttttacaacaccagggccgctgacacctacgttaatgatggcatctgcttctgttacaccatggaaagcacctgccataaatgggttatcatctggtgcattgcagaatacaaccagctttgcgcagcctaaggagtcgttatcctttgtagcctgggcagtttctgttacaatgcggcccattaattctacagcgtccatgttaagacctgttttggtagaacctacgttaatagagctgcatacacggtctgtagttgccaaagcttccgggatagaaaggatcaggtttttatcagctgtagtcattcccttgcttacaagagcagaataaccgccaataaagttgacgcctacttcctttgctgccttgtccagagtcttagcaatggtaacaaaatcttccggctttttgcaggcagaaccacctactaatgcaataggagtaacagaaattcttttatttacaatgggaataccaaaatccctttcaatatcttttccggtggaaaccagattttttgccagagtggtgatctttttgtagatcttttcgttgacagtatccagatcactgtctgcgcagtcaagaagactgatacccatggtaatggtacgcacatccagcttttcgtgttcgatcatattgttggtttcatttacttcgtagatattaatcatgacctgtttttcctttcagatgtttatcggctttattcgtatggggatatcaccacctggtgacgtatatatttaaattctgtgcatctttgtaaagatctcttctctctggatctttacggttacaccgatctcttctcccactttttccagctcatctgcaacctctccgaaggtcttttcgatagcagacacatctacgatcatcatcatgttaaaataatcctgtacaatggtctgggagatatccaggatgtttacatggttctctgccagataagtacatacctttgcgataattcccactgtgtcttttcctactactgtgatgattgccttactcatttttcattctcctcttctttttttatactcacgaacccgcgctttcgcgctttaccgcctgcttacgcagacagttcgttcgttacaagcaaactacttcactcattttatctctggaggcaacggaaatggagaaatccgatgctccatacgggcagtccccctcgtcaatttccagacggactgtctcataagccagttccgcgtaattattttccttgcttaaatggcctaagaagatttttttcagattatcatgaaggatattatttaacaatctccctgcattttcattggacaaatgaccgtgatccccaaggatacggcgttttaaatagtacggataagggccggtctccagcatgcgcacatcatggttggactccaataaaatggcatccagtttctgaaggtggtcgatcacatactgatcaaaatgtcccatatccgtagctacagccacagctttggaaccattttccacccggtaagctacaggatttactgcgtcatgatcgatcttaaagggctttacagtcagatcccctatctgaaaatccacatccggctctataggggacaataaaccgatatcaaaggttcccaatgtcttgcaggctgcgatctcgtctaaagtctcttttgtcccgtaaataggaagatgatattttcttgaaaggactcccaaccctttaatatggtcggaatgttcatgtgtcaccagaatacctgttacatcagaaccggtcagtccgatgtcatttaacccttcctggatccgcttgttgctgatacctgcatctactaacagatgggtgttgtcagaacctatgtaaatgcaattgccgctgctgccgcttgctatgcttaccattctcatgctgtttcgttatccttcccgcaaagaagtttctgtatctgtaaagaagtttcttcttccgttccgctgttgttgatctcacagtctgtaaagtttctgaattcttcttccgatgcctgatttgccatgatccctgcgatcttttcgtcagaatatccccggctttctttcaggcgtctgatacgttcttctcttgatgtataaagataccacatttcgtcgcagatgtcacgaaattcttttgaaggaatagcagcttctatgaccaccgactgtctgttatattcctctgcctcttttttcactgccttccacacaaggggatgggtcagactgtctacctttgctcttttggaaggatctttaaaaatgatctctgccatggcgctgcggttgatctgtccgtcctctaacaggatcttcgggcctaaaaaggcgcataccgcctcataagcctcttttcccggttccataagagctcttgcaacaagatctgcctggatcacatgaaaaccatatttttcctgaagaatggacaacaccgtactttttccggctcctacgcccccggtgagaccgatcaccgggtatttttttcctttacatgtaaaatgtgtctctaacatatcatctgttctgtcctggcacatagttctgatctgctccttaatcgtatcctatacgcttatgatctattttgcgtcaaaccaggatgctcctgttttcgcgtcaacttccagtgaaacctttaaatttgcagcatgtttcatcttgtctgtaaggatctcttttacctcttccacttcattttctgcagtctcgatcagaagttcatcgtggatctgtaaaacaatgcgggaggaaagccctctctttcgcagttccctgtctattgcgatcatggcgatcttcataatatcagctgctgttccctggatcggggaattcattgccacacgttccccaaactggcgctgcataaaattagaggacttaaattccgggatcggacggcgtctgccataaagagtcgtcacatatccctgctcttttccctgctttaccaaactgtccagaaattcctttactttcggataagtctcaaaataccgttcaatatattcctttgcctcttttctggaaatactcagatcctcactgaggccgaaagcactgatgccgtatacaataccaaagtttactgcctttgcatttcttctctgaagaggggttacttcctctaaaggcacatggaatacctgggatgctgtagtggcatggatatccctggactccctgtaagcctcgatcaggcgctcatccccggacatatgggccaaaatacgcagttcgatctgggaataatcggcatctgtaaaaatatagccctctttcgggacaaatacctttcgtatctgacgtcccagttccatacgcaccggaatgttctgcaggtttggctctgtactgctgatacggcccgtagctgttatagtttggttaaattttccatggatacggccgtcttcgctgatataagctgcaaggccttctgcataggtagaatttaacttggtcagctggcggtaatccaggatcttctgtaccaccggatgctccggagccagtttttccagaacttccgctgctgtagaataacctgtcttggtcttctttccacctggaagctgcatttcaccaaacaggatctctcccagctgtttcggggaattgatattaaattcttttcctgtttcagcatagatctctgtttccagttttttgatccctacttttagggtatctccatattcttttaacttgtccctttttacaaggacaccttcctgttccatatgccacaagctgtagatcagaggcatctcgatctctgtatacagcttatacatttcttcctgctccaagcggctctttaaaggctctgcagctttccaggcaatatagcccatatagcaggcacaggttaccgccttttcatcccctgtttctaacagatcgcccaggttttcttttccgatcaggtcgcttttagaaggaatggtcatggaaagataatctcttgccagatcatcataaccataggtatcttttaaaggatttaaaagataaccggcaacgcctgcgtcataaaccggtgcttcgtctgtaagatttaacagaggcagcatggatttaagatccaggacccagacagaatgaacggtgtcatttttacagaggttttgtactttttctgtcagccagctgtctgtgatctgagactcggacacacggatacagtagatttcttccggacctgtgcagatcgcaagggctgttacaggaagaaaggcagattttgcctttttgccggaatggactgttccatccgtatcaaaagagaaggtcagctgttctgcttccttcgaaacctttgccctgcttccggtgatcagctgcagacctgtaacagcggctttttccgctgccttaaagatcttttccgcctcttttttatctgtaacttccttaaatgacttctgtggaccattttccttatcttccatggaagcagagtcaaaacggtttaagatggacttaaattccatccgtttcataaacttaaaagcttccggtgtataaagattgccgatcagagcctcttcataggaaaatgggatgggacaggtgatgcagatcgttgccagttccttgctcatctgggccatgtcataatactcagaaagggctttctgggctcttggaggcttgatctcatctacatgggcataggcattttcaatagaaccataggatacgatcagattagtcgctgtcttctcgccaatagaaggcacacctgggatattatcagaagtatctcccataagagcttttacatcaataaattccgttggtgttacctggtattgttcttttacatcttccggataataatcatagatctgtgtgctgcctttgctggtcttggggatacggatcttaatgtgggtatccgctaactgcaaaagatcccggtcgccggaaacaacagatacttcgattccttccgcctgacatctttttgccacagttcccaggatatcgtccgcttcatatccctccattgtaaggatagggatattcatggtctgcagtgcctccttcatcagaggtacctgttcccgcagttcttccggcatcggttttctggtgcctttgtatgcatcatacatcttatggcggaacgtaggcgcagacaggtcaaaggctaccgccagatggtctgcattttcttcttccaatatcttaaacatgatatttaaaaagccatagactgcattggtatgaagtccttctgcattggtcagatccggaaccccataaaaagcccggtttaaaatactgtgtccatcgatcagtaccagtttattgtccataatataaaatccttttcaataatttattcttaaaatccagtctggctccagatacggatctggacgatcagtatcacaaatacagaccagaaacaaagggtatttactgcataaatcgcattttgcagaagtttcagcgtgtggatccgctggcgggaaagctccagtgcagtttccaacgcacctttgatgttgtagcttccggtaccttcatccagctgcctgatacccacatctactgtaaagtatatctcaagttcctcccggcaatccgggcaatgatcaatatgttctacaaatgctttcagttcctcatctgttatactgccattgatataaggcataaccagacgctctgcctctctgcaggtcatggcagtcacctccttttgcagcaaaactgctgtacgaaataaaacataattcagatatcatcatacactaaaatggggcggttttcaatgtatagaaaaatgcttaaatattttttaaaatattttctaaaaagaaaaaaaccttaggaacaacgtattcacgctatttctaaggtttctccctgccaagggtgtaatgccggcggcgggacttgaacccgcacgcggttacccgcaacagattttgagtctgcatcgtctgccattccgacacgccggcatttcttcacaacgaaaattattttaccatatagtttttggttttgcaagtggttttggaataagttctaaataagaatgttacagttcagtcatgacataaaaacagcggctgcctcaaattatctggcaaccgctttttttattattatgcatcttttctcctgcgttttgcaatgagcaataccaggagtgccgcactcattacggtgatccctgacatgatctcgatggaagtagaattatcaccggtttttgggagaattcctaatggaaccagtacatcctcaattgctttcacgatcggattttcagcttttggaacatcattgtccggtacgtctacagactcatttgtctgggctgcgtgacgtcctgtggtactggaaccaccgccgcctccgccgccaccactgtggccaccgcctccagtggagtctgcttcatacttcggaagggatctcacatcatatacccaggtattcgtttcttcgtttaataccgggagtgtagtcagatacgggcttacagttacattatcaccggaagccttgaactggcataccagatacaaaccggatgaaagtcctgtaaactggatctttccggaagcagttgcctgtgtagacaacgctccgatctgattattttttatgaattgttccagagtttgtgcagctgacagcacgccggtagcagtatgatctcctatatcagctccggaaccggtaaattcctgagacagagcatatgctccttctgcaccattccattcacctactttgtaaatggaaatagttgcttttttactttccgcttccagatcaatggtcagagataccggtctggccgtgtcgatacctgctgtttcgcctgcgaatgcaccctggcatacgctcatggtcatcaatatcactgccgccagaaaagctgccattttatttttcttcttcattcttttcatggcttccttctttcttctcttctttgctgttctgagagagttccttgtttctttggtcagcggtttcttccgttttgctgctggcttttcccttcttctttccggaaggtgccaggattccaagtaagattgccactccaaatgcagctatggcaaatagaatccattgtcttgtacccagtttgcgtccctgctcttccgccggtctgtcactgactgccggtgccggttttaacggaaccttttctgcatatttttcatcatatgggatccgtgttccccggatcagaagccggtgactgttgataccataaggagtacaggtgaccagtgtcacataatcttttcccggttcaatggaaagtccgtctacctcggaaggaagtacagtaacgatctgatcgatctgatattccaggatctctcctaatgttttcagatagaacacatctcctgtttccaggcggtccagatccgtaaacagctttgctgaaggaagtcctctgtgtccggtgatgatcgcatgagtgctttcaccgcctacaggaagggaagaaccttcgtaatgtcctgctgctacctgtaagacgccttcgctagtaccatgatatacaggaagttctactgcaattcccggtatattaatgatactcatgatccccgaaccacctgtgtttaaaaggtcttcataaggactgtcttcccggtctttttctgtactggctgcttcactgagattgccaaactgagcaagatattcgttgtaagcctgtgcgtcctgcagttctttggaataatccgcctccggaagttcctctactaacttgtcgtaagaagctatcgcccgtgaggaatgtctctcattcacatactcactgaccgcaggataaaggagaatggaaagaccgatcaggaaaatgatcacaaatatgatagttgaaattcgttttctcatccggtctttccgcacctcctgggtttatggttacttcataaaacttttttcacaatgtcttttataaatccattatacgtgaataggatttacgtgtcaattagtcatgctttctgctgcgtactacgaagaatacagcgcctgccattactacgatacctgctgcgtagaagattgttgtaccgatgccaccggtggatggaaggattgtaccggtagagttgataacctgtacaccaccgcttacatactctgttccatcagtattcaaggttgcattgttatctgcatctgcaactacaacttctgttggagtagttaataaattataaccctgtggagctactgtttccactaaatagtaagttccatttccaagacctttgatttcagtaacaccagcttcaatttctacaccagtttcgccttctacagcaagacggtatgtaccatctgttaatttaactactggaatttctttgttttttgctgcatcttcatataatctaaatttagcaaatttatcgccagaaattactttattattggtatctgtttttacaagaccaaatttatatgcatatacacttacttcatttccaggaatatagctctcagaataagtaatatgggcgctattctgattgccttctgatccgacaactgtatccgcacttaatgttgcatcataaataatttcaacttcgtcattctgatctaacgcttttacaaaatcagcagataacttaacttcaaatgtgcaacctgtctctaaacctgaggttgaaattgtatacttactgctatcaacagcgtttccattctgctctactttaatagaagcggcatccagagttaactgagcatccatggtatcatgtactgtaatttctttatcagtaccttttccatcagtcactttaatcttataagtaactttatctccaatagatgctgttgttgcatcaactaaagtttcaaccccctctgctgttgtaacaatctttttaacaatggaaggaagatcgttcttctcacgtaatgtctgtgatgagtctttatttaccaaagagcaaacagatcctgttgtagtatttacaaaataatatcctgcacctaaactatcaaaagatgctacaacttcaccgttaactttagaagcagttactgtctcatctgcgctcttgccagtgctgttttctgataagtaggctgcaaaatctccagccattacctctgtcatggttgttgtagttgttacaactaatacatttgcatcattagcacttggagtcaaagtgaataatttctgtccagatgcatattcatatccttcaacaacagatttccatgcactgtcggcagacattgtatacgcataagagtcaccacttgaagtataatcaaaaatcttatacgctttgtaagtttcattttcaaatgcaccatttacagtgatacttgctgccattgctgacataggcattgccattgctactgttgctgccattaacattcccgctacttttctcatctttttcataatcatctttcctttctttttagaaaaattccccttttggataattaattttttattattttttatacgctgcggagcggggtgccccgcagtgtttattactattgtttttactgtgaagtattattcttcacgcttgcgtttcaatgtcagacttaactgtatgcctgcatataacacggatgtgataattacagaccatccaacgcggcggatatgatcaagtccggaaccaccggtatctggtaagataactcctgcatagttgactattacatatggatttgttacactatacggatctaaacttgtttcaatcgtatattttaactgtgagttatccttatcatatacaatcgttatttttattggttcagattttaaggtaaatcctgtactggttgcggtttctacaaggtaatatgtctttccgtcttgtaaattctttaaagaaataagaccatctataccaggtgtgatattttcagatatacgagcgtttaaatcaatttcaccacttgcagttgcttgatataatgaaaacttaacctttaacatattaccacttgcgttttcaccgttagtctttttaaatactttctttaaaacaatatttcctgactccggtatataccgtccataataccaggttggattttctgtaactgttcctgcaaaagttgctttaattgtacacgcttcgtcttcataccatccatcaaacttatatttaatatcattataagttttatcaccaacaatatccgctgatgtaggttttaacttttcaatttctgactcttttattccctgatcaactgtccatgtataaccttctaatgcgttaaacgttgtcgagtccggatacttgaccttataacctaccgttattttattggtggtattaagcactatgatataatctctatgaaacgtattggttcctgcggcaacttttgaattgtaatcgttatagcctgcgttcgcaccatttgatacgatattacgcattaactctaatgtataatatcctttttctcctacatgttcactgccaggtgctgcatacttatatgtggtacttccctgtactcctgctttcggatatgtaatatccggaaattctggagtctgatttggataagctattgtaacagtgctattatcaattcgcgtatccgcagtatattggctaggtgcctctaagtactcaccatcaataccacctacacccaaaccaaaccagcgtgtattaggatctgttttatcatccgcattttttcctgggatcaatgcgtaaaaatataatttgtatcctgatactgttacattgaatgtttctgtataataccacctattattataataacgatgggtaacggttgccgtaccatttgatacgcctgtaatgcttacagaagaagaacccgtatcattcacagttacaatatttttgttgctagaagaccaagcatgagaacttcctgttgttcccgtaattgtcttagtttctccagcaatcaagcttacattctgcgctgcctgaacagctattccgttttcagctaataatgctataacggtaaaatgtctcgcctcaaactccactgcatccacagaagcttcgcctgcaacatcaatactttctctgccttctgcattgatctggatattgtccggggtaatgttgtctaccactggcatttcttcggttccgcctaaggcagcttctactgtttctgttggtgtttccagagttgctacctggagggtatcggcttctttactgagctgttcgatgcgttcgccggagaatttcacatttacgtgatggctctggccccagtcattgttcagctttttgccgtccagcataagattgatatcgtatgcgatcacagctgttacatttgtgccagtttcttcgtcattggctgttttctcgatcacagcttcctgaacctgatctgttacttctgtaactgtaagttcggttccttccggaatgataccttcttctgctgtaaccgttacggtcacgccgtttactgttttagcctggttgaatgccggatgcgtacccggtacgatctcctctaagaagatctctacttcctgatcctctaaaacttccgggatcgtatagtagacagcttcgtcagctctttctgcattggacgggctggcgatgttttccggatcgatctcttccagttccacaccgtttgcagtgacttctgttatcttataaccggtctgcgggatcacaccaaaggttacttctgcgccgtctcttgtaagttttggtgcttttacaagttctgcgctgcctacaggatcgatcatgtaattgatgatgtgtccctggctttccagttcatctttgtcaaatcccatatcagaaagctttgcggtgaaagctctcgctgttattgtctgatctaatgctaccaggttgtaagtctcaccttttaatgctccgacacgttcaaatccaggttctgtttctgtctcttctactgcacccggcagatcagaaagttttgtatcatctgcagctgttgtttcttctgtttcaggctgtgcagctgctcctgtttctgttgtgccggtattatctttgctttctgttgctgttgtctcttctggtgtttcctgcgaaagagtttcatcagcagtggtttctttaggtgttgtttcctctggtacaggatcggtttccggttccgttgcttctgcgctggtttccttttccggctcagtttctgtttcagattcggtctccggttccgtttccttttcagtttcttcttctgttggtgcctctgtttcttcttccgtctcttcctgcattgtatctgtcaggaaaattctggaatggatagaaatggaagcaactgtatcagatgaactgctgtcttctccctggtcctcattatcggaaccggtatcttctgaattttcattatcagaagtattttcttcctggttctcgtccggagtgttttcagaggcatcattctcatcttctgtatccggattttcctcattgtcagatccgttgttttctgtgttggaattttctgcaccagaaccatcttcgtgagatttatcctcattatcattttttcctgcatcagaagcttccggctcttttacttcttctgtttcggagtcaacctgtgagtttttttctccatcatcagttggttcctgatctgttccgggaacttcttctgctgtctcagcttctgaaggatcaattcccggttctgtttttattccggagctgctgctgttaccgctgttatggctgccgctattttctttcttttcaaatgcagtcatgtaagatttcaggctgcagataccggaaatgtatccgtcaatatttaccctgcctgctactgtttcttctcctccgtttgtataaaggaagatcagtgtttcttctccggtcagtgcgtaggagtctggatctgcatcaggactgatccgaaggaagatccgaagttcgatatcgtccagataatattctctctcataatccggaaagatctcatagagagtaccgtctgctgcgaacagttcttcgtattcttttaataacgaagagtctttcgtatagaagtctaatggttcctcgacgatgtttccttcctccagggcttcttctgctgcccgttggagttcatccgcatgaattcggaattcttcttttttctgccctgcaaatacattgagtagtggattgctcatattgctgaatacaatggcaaataacagtacatatgtaacaaccacctttatatacttacgaggcaacacagcgtgtcttctgcggtttctgcttttcgctttgcgtagctgattcatacaactccctcctcaataatatatgttcaactgtctgacaattacctcttctcttgttgtatttatggtatcattttccttatcacggtttttatcacaggttacgaaaaaagtgccatttttgaagaaatatttcaattttaaaaaaatatcccaggcagagtttaatctgtctgagatatctgttggacaatatgaacaattatattattcctgatacataggagtgatctgatagtcaatatccctgcgatttccgccaagttcttcgtaaactttggcgatccggttaaagacgatctttccattttcctttttagtatgatttagtatgatcagaaatcttgatgtattatactgcgtaaatatatcaccataacgcagcgtctgtttgatcgcctgtaaaagaagggcgccttttttcgctgcaactgccttttgtaccggcagtttcttcctatttacaatggtacactgcatcaggcaggaaacaacctctatacgggcaccaagtcttaagatggaacagtacacatccataaagtttagatatgggcactcatatacctgttcttcacttttcttggctacttccagaaagcttacctggatatcgtcaagatcctcataaccaccttttaagtactggctgatcttgcgggaacgctttaacatctcttcggaaacaggcagatccgaaacttctgtatagatccggaccgctttttcatatgttttatatgctttctcatactctcctaaagcgatcagcgcatccagctgccctaactgccattcctcgtaagtctctattcccaatgcagttgtatacagggtatacagatcttcccagcgttctttttcttttaatatatccgcgatctggttggtacagtcacgatacagttctttataatgaagattctcagaaatagcccattcttcaatggaattgctggcaagcagcggtcctctgtagagaagccaggcttcctgaagtatatgaagtttatcatcatcttctgcatcccggctttcttctaacagccgtttgaattccacagcatctacctgaacaggtatatcttctttccacacacagtttccattttcaatggcgatatattcgtcacctggaacccccgcatccgtgagcatttttctcagacgatagaccgcattgttgacactgttgttccggttattgaactctcctgatttataaatgtcagccattaatttttccttggatatctgaaatcccggactgatcatcagaagctggaacagctgtgcctggcggccggtagatgtacgtcccatgtacacctttttgtctccgtaccacacagaaaactctcctaataaattaacatataacttcttctctcccacatcaacagcccctttgcttttgttcacacctaattataaatgtagcacaaggggtatttattttcaatattcatttacggatttgattattttcatcatttctattttgcagataaaaacattccaccagaccggcctttttccaaccgatcacatttttcatttcccgttctgtcagcctgccgttaaagtacatacaggcaatatccataggtacgctgcctactgctgcaaccagttctaaatatgtcattttacattccctcccgtttttatcctgcgtgacataacctttttgacacgctcttatactatatgaaaggaaatgaaaatatattcctgttatccttcatgaatttgtaagtatttctttatacagagtccataaaagcagagtaatatataataaggaagaaatactatacgaggaggaaataattatggatacaaccaaaaagatcattatcggtgccataggtgctgctgttgtggtcggcgcagtttccatcggtcttatctttggtctcgctccggcggatacggatctgtctaccatacatacccaggaagctaccagtgtcccggaagcaacagaacctgcaactgtggaggaaagttcttctgttcaggaaagtgagactgttaaagaaggaactacaggtatcagcgtacagcttgagacttattcttccggaaatatttccattcaatatccggtggtaagccagatgaacgacagcgcaaaacaggacaatgtaaatgaacttttaaagaccaatgccctttccattattcaggcaaacgatctggatgaaaccgcagatactcttactgtaaaatgcgaagtcatatctgcagaccggaagcgtctcactgctgtttacaaaggagaccgcatgagtaatggagctgcttatcctgtcagtgttttttataccaacacagtggatctgaaccaggtaagaaatcttgggctttctgattacacagatggctacactatggccggttatgttttaagtgatgatgtggaatttgtaggtataacccaggatcagaaggaagcttttttagagtatcgtgacagtttggatctggatatccttacagaggtatttaacggagccgactttccgctggcatctgatactgtatggccggaatccttcagctatgaaaaccacggaactatctgcttttccgttccggtcccccacgctttgggagattatgtgatcgttgcatttgatccttctaccaagtaattaacgttgccattatccacgctatcagttataataggaaacagaaaagacagacaagtatctgtgtcttatacaacacgaataaggagcagcaaaaaactatggaaaatgtaattgtttttgatcacccattgatccagcacaagatctctattttaagaaagaaaagtaccggtacaaatgaattccgcgctttgatcgaagagatcgccatgctgatgggatacgaagctttaagagatcttcctctggaagatgtagaagttgagacaccaatcgagacctgtatgacacctatgatcgcaggccgtaagctggcagttgtgccgatcttaagagcaggtcttggtatggtaaacggtatcctggcactggttccaagtgctaaggtcggacatatcggtctttacagagatgaggagacacatgagcctcatgaatattactgcaaacttccggatccgatcgaggaacgtaccattgttgttactgacccaatgctggcaaccggtggatctgctgttgcagctgttaatttcatcaagcagcacggtggaaagaagatcaaatttatggccatcatcgcagcaccggaaggtcttaagaaactgcaggaagcacatccggacattcagatttatgttggacatttagacagatgtttaaatgaaaatgcgtatatctgcccaggtcttggagatgcgggagatcgtatcttcggaacaaaataggacgtaaaaaattaacccccgctggttagcgggggttttattatatattcttcactcacgaaccacgcgcttacgcgctccactgcccgctttcgcgggcggttcgttcgttaatggcttgcaaaaaacaaatgtctgctaccgcagccgcttgttttttgctgcgcacattacgttatttcacaacctttggctttctggttgctctcttctttggtgccggagcttcttcacggttttcctttgctacgatattgtcctggctcttgtagatggagtgagcagcaacacagcctcttacgctggataatgggtagatgttgctttccttacctacaacagttcctggattaagaacactgttgcagcctacttctacgccatcaccaaggatcgcgccaaatttcttaaatccggtagctacgtccttatcttctgcgtgtactacaactaaagacttgtcagactttacattggaagtaactgcgcctgcgcccatatgagccttatatccaagtacggagtcaccaacatagttaaagtgtgggatctgtgcttcgtcaaagatcagagcattctttaattcacaggagttgcctacaacagcgccagcgccgatgataacatttcctcttaagaatgcgctgtgacgtacatttgcgccttcacagatgatcataggaccagccatcataatggtaggtgctacttttgcgctcttgtgtacccagatatcagtgccgatcttgcggtattcattttccggaagaagaggtcctaaagaacggatgaaatcaccgatctccggaagtacttcccaggcataagtatgattatcaaaaattctctcagcaattgtatggcttgtatcaaacagctctttaattttcatttccttcagtttcattgtaatcagttctccttttttgttttgtaaaaggcggcagccgcgtcaaaaagtccccgcatatcatactggttattcaatctggtcacgtttacagtgcgcattgcaacaaaacgttccagtttttccatgtattcatccgatgtaatggaaccttccgccacataagtcagacctttttcccagctagcagtcagctcaggatttaataactgcctgatggagtggtccaccacttcataaaccatctctcccaacagagacggggttatcacctgggtcttctgatttaaactcagatatttaatactgaccagttttttcagtatctccgctctggtggcactggtgccgatgccgctgcccttgatctgggcccgcagctcctcatcttcgatcagctggccggcattttccatagccaggatcatggaaccggaggtatatctttttggtggagaagtctctccttccttcaccttcagatccgctatagtaagtatagcattttttttcaaatctgcaagcacctgtaacagcagagttcggtcaactttcggaatttccgcgtttttttcatctgtttgtgcagaatttccctctttctcatcagaaaaggtctcctggatgctgcttttctttgccaggttcacatctgccacctttaaataaccaggttctgacagcactttaaagcttgcaaaaaactgttcttttttccgttccagtaccagactgtatttctggtaaatggcagccggataaaagatgcttaaaaatcggcggcagactacctgatagaccttttcagataacggggacagtccgcgcaagtttcccattccctgtcctgtaggaatgatggcataatggtctgtgatctgcttgtcattgacataacgggtctttgcgatccctttaaaacttccaagatccattgcttcttttgcaaagcctgccattggttcatagcgcatgagaccgttaatatttttatagatctcctttgcaacagctgttgaaaggactctggcatcagttctcggatatgtgaccagctttttctcatacagttcctggaccactttcaaagtctcatccgggcttattttaaacattttggaacagtcattctgaagttccgcaaggttataaagaagaggcggatttttcgtttctttcttcttttctttggaaaggacttttgcctctaaaggcggctcttcttttaagtaggcgatcagctcttctgctttctccctttctttaaaaccattttctttataaagatagggcgttccaaaatatttagagccttctaccgccttccactctgcgtctaacagcacaggtgtaccgtcttttgcagttgcctgaaagcttccaagaacacggtagaacggggtttttacaaagtttcgtatttcccgctccctgcggactaccattcccaggacacaggtcataacacggcctacggaaaggactgtaaattttgttcccagatactgagacatagacggcccgtagcgcagggtcagtactctggaaaaattgatacccataaggtaatcttctttggctcttaagtaagcagaggcagaaaggttgtcatattcagactcatcttttgcttcccggatcccgcgaaggatctcctcttcggtctgggagtcgatccacacacgcttctggtgcttgtcctttacaccagccatctgggctaccagacggtaaatatactctccttcccgtccggagtcggtgcagacataaatagtatctacatccggccttgtaagaagtccttttacaatggaaaactgcttttccacacttggtattacttcatatttgaattcttttggcagaaaaggaagtgtattcagactccagcgcttgtatttcatatcgtaggcttccgggtaactcatggtcaccagatgtcccacgcaccaggtgacgatcgcctcatctgactcgatatagccgtctccgcgacgtccccgtattttcaatgcatctgcaaactgctgggctacactgggcttttccgcaatgtataatgattttgacatttgattcctcattatttaaagacatattttataagtataccattttttcagggctcttgcaagaagttataaaggacagtccaaagccattttccagcaatagactgtcctttttgtactgtatatttttgaagatctgcctgccggcagtatccgtctgaccctattctgcgtagaacttataaatggtagttgtcttataagtatctcctgcttttaagatcggtgacgggaagtttggcttatggcaggcatctggatagtactgtgtctcaaagcagaacgcatggcgtctgtcatagtgggcaccgccttttccagggcgctcatcttttaagaagtttgcagtataaaactgcattccaggaagatctgtgtatgcttccatcacacggccgcttgctggatcttttgccttacctgcaatgccaagaacgcctgcttcatggtttaatacccagttgtgatcgtatccatgtccaaggatcaaagcctcaaaatcaacttcaatgtcctgtccgatcggtttcatctttgtaaaatccataggagttcctgctaccggaagaatctctcctgttgggatggaaaccgcgtctgcaggtgtgtatgtatcagctgcaagccatacctgctgatccattacaggaccgctgttatgtccggccaggttgaaatagcaatggttggtaaagttagctactgtgtctgcatctgcaaccatgttgtaatcgatttttaagcagctgtcctctgttaaggtatagctgatgcggatctttgcatttccagggtatccctgatctccgtccgggctgtttaagaagaagtccaggcggctgccttctgctgtctcatatgcccagctttcccataaacggctgtgatacagatccggaccactgtgcaggttgttaggaccattgtttgcctctaatttataatcttttccgtcaatggtgatcactgcgtttccaatacggtttgcatttctgccgatgggggcgccaaaatgaggtgtatttgcctgatagcttgcaagatcgtcatagcctaagatcacatctgccatgttgccatcacggtccggaaccagcattttggtccaggttgccccaagttcaataaacgacgcgctgacaccgcttttgttggtcagtgtgtactcgtataccttttccccggaaggcataacaccaaattcttttttctgaatagccataagaaaacctcctgctcccgctttatttagctgcgatatatcccttagctgtaagaagttctgcacacagaactgcaccgcctgctgcacctcttacggtgttgtgggaaagtcctacaaatttgtagtcatatacggtatcttctcttaaacggcctacagagatgcccataccatgttcaaaatctacatccaggcttacctgtggacggttgtcttcttccagatactggatgaactgctttggagcacttggaagttccagttcctgaggaatgcccttgaagtttactaacttctcgatcagctgttccttggttggtttctttttaaacttaacaaatacagctgctgtatgtccgtttaatacaggaacacggatgcactggcaggtgatcacagggctttctgcctttacgatcacaccgttttcaatgtggccccagatacgcagtggctcctgctcgctcttttcttcttctccgccgatgtatgggatgatgtttccttccatttcaggccagtccttaaaggtctttcctgcgccggagattgcctggtaggtagttgcaactacttcatatggctcatattccatccatgcagttaaaacaggtgcgtagctctgaatggagcagtttggctttactgcgatgaagcctctggtagttcccagacgctttttctggaattcgatcacatcaaaatgttctgggtttacctccggaacgaccataggaacgtctggagtccaacgatgtgcgctgttgttggaaacaaccggtgtttctgtctttgcgtattcctcttcaatggcacggatctcatccttggtcatatccactgcactgaatacgaagtctacactggcagctactttctctacttcgtttacgttcataacaaccagcttctttacagcttccggcataggagtggtcattttccagcggtcacctactgcttcttcgtaggtctttcctgctgatcttgggctggcagctactgtaactacctcataccatgggtgattttccagcagagagataaatctctgtcctaccatacctgttgcacctaagataccaactcttaatttcttttccatagttcctctcctcatcttccgcagggctttggggcagccgctgctttcgtttttgccccgtatcggggagtctttccttatactataacaaagtcgggaaaaatgcaactaaaaattcgtcttttgcgcacatttgtatttatatcgcggacatggctttatttttgtttgtcagaagtttagttcaaacggactttactgccttttccatctctttttgccagtttcaacctgtttaaatgaacttctttgcctttatagtcgatgatcggattttcaccgatgagatatactgtttccagttcttcattctttgctaagcggataccacggacacctctggaggctttcttaagaacagagatctcctctaacgggaaccgcaggaacgttccatttgtagtctgaagcactacatctgtttccccgtttatcattgttacagaaaccacactgtcctcttcctgaagcttggtagctgctaccatacggttgttggtctcaaattcttctccaggcacctgttttaccatggcaagacgggttgcaaataaaaggatgcggcctttcagttcacgggctgtagtgagaaggcagatggtctcatttctgccatcgtatttacttaagttctcaataggaacgcctttgtcacgcagcttgccggatggaatatccaaagccttgatctggtgaaggacaccggcagaggtgaacagacagatcttatctgtatttaagcagcggagcacatgaacctgttctgtatctacggtctcctggttgcgttcgtaggtagatttatcaagaagcttgcaatagccgaagcggtccataacgaaaacaacttcctgaacggaaatttcattttccacataaacagcctctgccccgtcttcaatacgggtccgtcttggaatagcaaattctgctttgatggcagccagatcatctttgatcacctggttcataaccgctctgctgccaaggatcttcttgtattcggcgatcttctttaaagtctctctgtgttctttttcaagggctaatatttccaatccgatcagcttatacagacgcatttccaggatcgcagatgcctgacgccctgtaaaatgaagcttctttgcatcttcttcaaaaccggctactttaaaatgaatattggaaatgtcgccgtttaccagacatgccttggcatcttttaaattcttagaaccacgtaaaatggcaatgatcaggtcaatacagtcacaggctgcgatcagaccttcctggatttctttcttatccagttctttttccagaagcacattgtatttgcgctcggtattctgatactggaattccatgaaattacgcaggatgccttttaagtttaatgtttccggcctgccgtctgcaatggcaagcatgttgacaccaaaagtatcttctaacttggtcttcttataaagaatatttttaatacggtcaatatctgcgtccttgcgaagttctaacacaatgcggataccgtccttattggactggttggaaatgtccactacatcggtcagcttcttggactctaccagatctgccacatctaccaggaatttattaatacctgcaccgatcatggtataaggaatctctgtgatgatcagtttgtccttatcaactttccgcttgcccagttctacctcaaaacggcctcttaatttgatcttgccaacacctgtttcatagatctgtggcagctcgcttttatttgcaataatgcctccggttgggaagtcaggtcccggcagatattccatcagttcttctgtaggagctgccggatcatcaatatatgcctggactacatccactacttcccctaaattgtgggtaggaatgctggtactcataccaacggcaattccctctgcgccgtttactaaaaggtttggcacacgtacaggaaggacttccggctctttttctgtttcatcgtagtttggcacgaaattaacggtcttgtccaggtcttttaaataaacttcctgggcaaatttctccagtcttgcctctgtatatcgcatagccgcagccccgtccccttcaatggagccgaagtttccgtggccgtctaccaatgccattccttttttgaattcctggctcatgacaactaaggtatcataaatggagctgtcgccgtgtggatggtatttacccatggtatcgcctacgatacgggctgattttctgtgtggtttatcatggtccagatgaagctggctcatgtcatagagaacacggcgctgaactggctttaacccgtctcttgcatccgggatcgctcttgcagtgataacgctcatggaataattcatgtagcttttctgcatttcctcgctgtattcggttcttaatatcttctccgccatatctgtctgtcctctctgttatgcgtcgatctctgcttcgtctgcatgttcataaataaactggcggcggggtcctacctcactgcccataagcatttctgttacttctgacgccattctagcatcttcgatctctacccgttttaatacacgccgctccgggtccagtgtagtctcccaaagctgctctgcatccatttcaccaagacctttgtagcgctgtaaggtaaaatcaccggtgtggtttctgcggtagcgttccagatctttttcatcatagagatactgttcttctccctttttcgggatcactttaaataacggcggcatggcaatgtatacatgtccgtcgtagatcagctccggcatgaaacggtaaaggaaagtcaataataaggtatcaatatggcttccgtctacgtccgcatcggtcataaggatgatcttgtcatagcgcagttttgtgatgtcaaaatcgtttccgtagccttcggaaaagccacaaccgaaagaattgatcatggtcttgatctctgcattggccagaaccttatccatagatgctttttctacgtttaagatctttccacggatgggaaggatggcctggtactgacggtttctggctgtttttgcggaaccgcccgcggagtctccctctacgatgaagatctcacacttagaagcgtcacggctttcgcagtttgccagttttccgttgctgtcaaaggaaaacttggacttggtgagcatgttggtctttgctttttcttcggccctgcggatctttgcagatttttctgcacagccaatcacgccttttaacacttctacatttcggtcaaagtaaagctgcagctggtcaccggttacagtaaatacagccttggtagcatctgcgctggcaagctttgtcttggtctgtccttcaaaaataggatccgggtgctttacagcgatcacggctgtcataccgtttctggtatcggcacctgtaaagttggagtctttgtcctttaaaatgccaagctctctggcataagagttgatcagagctgtaaatttggtcttaaatccagctaaatgggtgccgccctcctgggtgaaaatgttgttgcagaagccaaggatattttcctcaaaggtatctacgaactgaacgcaggcttctacctcgatcttgtctactacacccttaaaatagatggggtcatggatcggtgtttttcctgcatttaattcttttacataggcgataatgccttccggttcgtggtaagttaccttctcttcttccccacttctgcggttttcatagtggatcatcaggtttgggtttaaataagcagtttcatgtaaacggctctttaaccagtctgccttaaaacgggtcttttcaaagatctccccatctggaaggaagttgatctcggttcctgtctcacggctttttcctataactggaaggagaccattttccagctctgtagtaggatgtccctgatgataagtatcctggtagatacagccgtccctgtaaatctttacagtcatatgctcagaaagagcatttacaacagaagaacctacaccgtgaagaccgccgctggtcttatatgcgttattgtcaaattttccgcctgcatgaagggtggaaagtaccactctggctgcagacactccttttttatgcatttccaccggaataccacgtccgttatcccgaacggtacaggagccgtctttttccaggcggacggtgatctgggtacagaaaccagctagatgctcgtccactgcattgtccacgatctcatagatcaggtggttcagccccttagacccaactcctccaatatacatacccggccttttccggactgcctccagtccttccaggacggttatactgtctgcattgtattgttcctttgccatttttccctccatattgcattatgttctcttgcaatctttcttcactgctatttgatgacaaaaaaaa

SEQ ID NO: 3559 - DNA, 99559 bp, Unknown
  gut microbiota DNA sequence
caagaagttttgaaaaagccctgcaaatgctatttatacatctacagggcttctcattccttaaatagtttaagcagataacgggaatcgaacccgcctcctcagcttgggaagctgatgttctaccgatgaactatatctgcaacacaagaattattataacaaaaactgccggaattgacaagtgattttccagttcttgtcatcgacagtttttgcggttcaggtatggttttaattttgtttcccggcttatgccggatcatttttacttttctatattttccgttttctcttctagttcttctcccgcggccatatccaggtcattcatccctttatttcccgcttccggccactgatccatatcaataaaatctccactccggggatctatatggtggagacggcagtaatcaggtgtgttctccgaataattcttctttttaagagcactgttaatatataaggacatggccctgtagataactgcaaaagtaggcactgctatgatcattcccacaaacccgaaaagaccgccaaataacaggatggaaaacaatacccagaaacttggaagaccggtagagtctcctaagatcttcggtccaagaatatttccatcaaactgctgaagcaccagaatgaagatcaaaaaatacaggcacttcatgggatccactaaaaggatcagaaatgcacttggcaccgctccgataaatggtccgaagaacgggatcacattggtaacacctacgatcacactgatcaggagcacatatggcatctttaaaaattttaaagaaaagaaacacatgatgcctatgatcagagagtctaaaagctttcctgtaataaagccgccaaatatcttatgggcaaaacggacttcaccgatcagtcggttagctgctcttacatttaaaaatccataaaccattttttttgactgggcgcacagtgtatcttttatgtttaaaaagtacaccataacaataaggccgatcagcagattttttaaaacagtgaccagactgatcacaccgctggaaacgcggtcaaagatcagggaaatatttggcaccagatccgtagcgatccagttctggaaacgcatgaccgcctcattgtaatacggcataatgctttcctgaagatgttcattatcctgaagaagtttgctgatccagacggtcaggttgttgatatactctgtcaggctgtcctggaaaccaatgatactttcgtagatctgtgggatcaacatggaaaccagtccgctgacgatcgcaaacaatactgcgagactcaccaacgttgctatactttttgcaatacgggtgcggccctcatcatttttgatcacctttgacagaagatcccggacacagacttctgtcctgttgtaaaccggcagcatcagatatgccagtacacctccgtatataataggcataaggatcgttatgatcttttttatgatcgctgcgatcacggaaaatttcagtaatgcaaaacataaaagaacacaactggcgatcaccgctaatgccgtaagaccccagtccataaaaaatcgaaatttggaatttttcatattttagttcaggctcctatgttactttcgtcatttgtatgagtataccatactatacccgattttaaaagcagaccggacgttaaaaaaatgtttttaatttcaggatcgttctgttaaaacagatggttctgtgttaaaatactatgcacatacatttatatcattttacagaaagaaggcgatcttttgtcttatatcataaaaatggctctggatatcaaagcccgttttaacccaccagcccatatgtcctctcccattgaagcatactgcgccattggaacagttgcaaaagcccttggtcttccctgtccacagcgtaaagatacgttatttgaaatgcgccaggaactttctgacgcagaagcaggaaaaagttttccatccgaacggatcgaaaagatcaatcagatccttatgagttttatccgtgatgaagaaacaaccgatgccatgatggcttatgttacatatggttatgaaaatgaaaacgggaatgcctcaacataagcactcccgtttttattataagatgatccgcactaacagccacacagctgcaattcccaaaaggatcatggaaaaagctgccgaaagcccaaacagcaatactcctactgccagtgaaatgataaatcccagcatgctgaatacagcgcccattacctttccgcacatcatcagcaggataccaacaaatttaaacacacagatcagaaataaaaaagcaaataaaattcctaacattttatctaatatcctttgacctttctaataaaacatctactacaaaccgatcgatcacccaggaagctgctacagacaacaaggcacaccagaagatcggtaaaaccacctgcagatactaacttagaacgtatctcctatgcgatatattccaaattccttatgtccaaggacttctgccttggtcagttcgccgtttgccacagcaaccatcttatcaaaaatttcagcacctatatcctgtggtgtctttccttctgtgatgaccctgccggcatttatatcgatattatctgtcatctttgcataggtttcaggatttcccgtgactttgataacgggcgcaaccggactgcctgtaggagttcctctacctgtagtaaaaagaatgatctgtgctccacctgcaaccataccggtgatggagtcaatgtcttcccccggtgtatccatgaaataaagaccatgtttttccggatcaaccgcttctgaatactccagaacaccgatcacaggactctgacctgctttatgaatacagcccagggatttttcttcaatcgttgtaagtccgcctgcaatattacctggcgtaggctgtgtcccccgaaggtctactccgtaaagttttgatttatcttcaatacgcttgaccatagctgtaagcttatcacccatttccttggtcacgcaacgggcagctaccagatgctctgcacctataagttctgtggtctcgctgagtatacttgtacctccaagctggatcagcttatcggaagccgcacctacagacggattacctgcaataccactggtaggatcactgcctccacactccagtcctaaaacaagttcgctgatatcaaacgcaaccttattctgaacggaaagttccctggccattttagctgcaatttcagcacctttggcaatgcagcctaaggtaccgccacattcctggatgataacagtttcaaccggctttttactttcgcggatctgatctgctactacttccggctgtattccttcacagccaagactgacaacaagtacagcacctacattcggatttttgccaaagccaaccagggtatttacagtctgaagataatctgcgcctacctgacagcagccatgctgatgaggaattgcaactgctcccggcactaaagcagcaattctttgtgcagtctcgctggaacagacggaagttggcaggatcaacagatgatttcttattccaaaagtaccattttctcttttgtatcccattaatttcataattatgtttccctttcctctaacggtcaccgcggcctctgcctgactctaaattctgggtatggacccagtcacctatgtggatatcacagctggcagtaccgatgctctcaccatattttacaaccgtctcccctgtttttatttcttcgatcgcaattttgtggtatacaggaatatcctggtttgctttgatttttacgccatctacctcgattgcttctccggcatttagctggcggatcatggttactacattatccttgtcggtcatgtatacataatttttcattcattttctcctgttaaatttattttttaagtttattataaatggatgtattctatttcgccatcttttcaattgtcccaaaaataacatccttataatttttctgtgtaagatccgtcagatcatgttcctgcttttccaatttttggagtccccagaaaggtgtccaggaatttccatggattgcgttataaaacaatgaatgattggatggagaacatccctttgtccagtctttcattctatcaaattgcatttttgcaatataaacctttggaacatcgcatgtatcagaatctacattgatttctaccgcatataccggaccgtcaatccagccattttccataacagatccatcatccaggcgctgaaacagcaatataaaactccagtagatccagccttcccatgtctgatctgagctgtatctcatgaaacgttctgccggcatgtaatattttttcgtatccagttctgttctgcatttaccaataagcttttcaatttcctgcaatgttttaaacacaaccacaaaagcattatgtatattttctccaaccatcatttattctttccccttaagcatcgctttttacaaaatcatttccatccattgtccagcagatatctttatctaccactggctgatcaattgaaaaaccttcaaaggatacaaaccccttctctcttagcaacgtttttaaatcttctatcattttcttttcatatgatgatgatatcaatacctgatccagtcccagtaaaatatcctgccacgataaatatgccagatgaacatcccggaatacccgtttatccttgttttcaatataaattgcttttgcctcctctgcctccccgatcaatattaagagtttttctttaccattgcaccattcatcaagaacctgcgcttctttctccaattgatccccaccagataatccactcctgtattttacctcgatcccgattcccacagacgtaagcggaataaatccatcgatctcaaccagtccattttccgaccgcttccagaattcaaaattaaaatcatcatctgcggcattagaaagaatatgcgtcacctgcggatcttcactgactgcgtaattcttaaatatctgattcaggcctctattaaaaggcatatacctcatagcaccgaaaaaatcaccagtcagcacatcttccagatctgtagaaaacttatgataaatttcagctatcataaaacattcctttccttgtttctttcttgttctttctcaccattccttattcacctgatttaaaaacaatcatctgttttttctgtgctttctggtcaagttctttatttgcaagccgtacagccgctttttccgtcatgggatcgcgaatttccacacagatattcctgtctgaccgtgctttatcaagcaggcctctggtatcaagcttcactgtcgttacgtttttttctcctggcatcagttcagatatcttccaatctaatgttttttcctcaatgacagccccggaactgtctgtcactgtgacaactaccggccagtttttataaaacggtgccgttccatcattttcccatgtcagtatgagcgttgcctttcccaatgcctgctttaactgtgcctgggtgacccagatccggtatcccatatttttcaacaacgtctgatatccatccagataggatttatcagcgatcttcggacccagaaatgtggtatgagatgagcggatcagctctgccgtctcattcaggtttttaactaacatccgtctcatacttatggaactgtttaattctcctcccacaggagcctttttccaaaaactgttcatgggtacaataacatcggtttccccggtctgatcatacacaccgccattttcaatccactctatccatgtcttcgtatcttcgggatggcccgccatatcattgtacagaccaaatccataattttttgcagaacagaatggtctgcgcatcaggatcatcgcattcggaaatgcctccggccataccttcacatactgctcccttacttcttccaacggcaatctgcgaattcctgccccataattaacatgccattccccccagtgaccaaggctgcccaattctatataactgatcaacgaatctgaaccccagcgttctcccatagcttttaccgcctgtgtatggcgtctgatcatggtcgtattagaataatccggcgcaaatccttttccataatcattgtcgtaccagtctccgtctttccctgtttcccggtacagccagtctggaatatctgtatgactctcatctccaggatcatcacagataaatcttaataccagatgttttccctctgatctccaacgaaaaaactgattttctttttcaatggtgtcccagtcatataccccacattccggttccagctctttccatgttatatctacatacaaaagtgtgatgtcctctgatacattttcccttctggcatccggtgcatatcccattaatggatttccaaatgtttccccgctttgtgaaaactcttttgtctcacttctaaaaccaggcagtgtcgccgcccgtggggtgcagccacccaaaaaagagaaggctgctgtaagagctgctactgtaattacttccctaaccatgatattctccattatactgaatcaaagttacatcatttacaccctctactgcacggatcttttccataaaactcgtgtcctctttcttgcagaatacttcaattgccatctcagtcatcccctttcgcatggtctttgatttcagaaaatatttccgttttccaaaacagcggattgcttcatcacctgccacatcaccctgataatggatcactgcaatatatacttttcctttttcctgataatgataaaacaatgtgagcatcactatcataatgatcgctgctccccaaaccaagggatacatttctgctcctgctgtgatacctgtggtaatactccagaaaagatacaaaagatccatagggtcttttacggctgtacgataacgcacaatcgataatgctccgaccataccaagggagattacaatattggtgctgatcgccagagttaccatacatgtcagcacacacattcccactaaggtcaccgcaaaacttcttgaaaacacaactccggaataaaactttttatataccatatagatcaggcatcccattagcagggcaattgtcatggcaagcatgatctttaacatatcatactgtgcaaatgtgcctgattccaggacagattttttgatcgtatcttttacactcataatttcctcccatttattctgcccaatattcaaatccatgaagatatctcgttttttcacagcacagaacaaactttgaaacagctgtaaattctgatgcactctgtggaacaagatttcttacaatctggggcagaaattccgtatatttaacttccataacaagttttccaggttccagcacatcaagcgttggcagactgctgtcaaaaatatcatagcttcccactgcagcacgcacattcatgtccatggtaagccgtactgttcctgtatccatgatccatggttctctttcataatctacgatcacccttggacgcatcatattgcaaacacactcgatgtaaaattccctgcataaacgataggaactgcgcagcaaaaattcgtattttccatccaggatccattctacttcctgccgtgtcagcggcgcagcttctttgtatatgtaactgccgaattttttctttctctcaagtttaatgcttttgtcactgcaattatagatcctgatcctgtactttttacgcataagtacacctgcatccttttcttccatggcactgttccagtaatcatcaaaatacaggctgcggatcatgtaaccgccttcccctgcgtgaggatccagctgcatgcattcccttaagcgcagatctgtcagttgcttctcagccctattgatcaggtatttccattcgtgacgaaagtgttccttactcttcctcatatgcgtctactccaaccgtatgatcttcgttaatataaaaacagatcatgccatattgttttccggtatttgttacataataatcaaaggcatcctgtgtctttcccgattcatttgtggcccgtatacgcacaaaatattgcccagggtccggaatatctaccaatatctccgggatcaacgtctgttcttccttgtagatcacctgggtaaactgataatcccgggcaatttccacactatatgtaatatcttccgcatcaaaatcgtaggaagcatcccaatttattttcagttttccattttctgtcacaggtcttccaatataaaacggcattggtttttcaaggctttccctgtacatctcataattttgttctacttctttcggaagccctgcttttacctgttcatactcctccggtgtaagtggttcattcaactgatccggcattttctctacataaggctgtacaacacctgcatactgttccaccatttcttccagccgttcttcactgagatatctgcggagttcttctattacctgatccagtttttcacggaaagcatctgatttcaaacatctttgaaataaaatatttccccagtaattgctgactcctacctcccagcttccacgatttgtattttttttcaaagcccattctgtattaaaaaagcttccatcattatcccatggcaaaatataccatattggcgaatttgtcggactgtacaaataacaattccggctctgcgtatcactgtttccaactaaaatctgaaatgccatccagtacagcagattttcctcatcgaaatgctgctttaacacatcgctaacaggtattgaataattattcagatcatccagcatctggattaatttcgtgtgatcgtgatcccctttgatctccagcctttcttcaaattttgacagatcaaaacctggtgtatcttctgtcatgatcgtatcttcatagcgataaaactcaaaataatttactttatagagctgcccgtttttctgaagtccatgtgcctccaaagctgttttatttaactgttctacctgtgtatacaaaccataatcttcaaatgcatctttcccggaagttgtatcttttacataaagatggacaaagcgggttctgaggctcattatctgtgggatacccttaagaagatcataacataatttgtttctgaagcgtagtccctctgacatatgcttgtttagcgcgatcgtctgctggccttcccatgatcccttattctctttcaacttgatcttataatttttctggggatttttactggaactttgtcccctgatctgcacagttgcattcggtactgtctcaccgtatccaacctctcctgcaacagggccgttttcgtctcccacctgtaaaagagctgccacctgataccttggcactcccatttcttcataatcaaatacagaatatgaattaatttcttcccaactgtgatttgtattttctgcatcatttccacgactgactgtcagatacatagtagtcacatttgtttcatcttcctttgaatataaaaggtccttatcccgcagatgtacctggctaatatcctgttcctctgctttttttacaccttgtatctccgtttcttctgatgcggtcgctaaatccgtactgctttcctgaattttttcatttttctgcaaaaccatattgcatccacaaagagcagatgaaaccgcaagccaaacgcttaatagtaaactaattcgttttttcatgaagtttttccttctttctctcaccatcaagaaaatatccaagttttgtaaacacccccagtttatcctcctccactaaaggctgtctgctgagaatataatatggaagcctcctggtgaattgttctaatctgatataaactgccaggaaaaaaactgcacatcccagaataaatccaaagccaaaatacactttggaaaagaacagggatatcaccgttgcagctgaggaaaccaaagcaaacagagccgatgccacaagtccaccctgataatctgtaaaatataacaggatcaaaagcatggtattcgcaactgcatagatcccatacccaacgcagagtgtcctgaaatatccttccataagatcattaaatccaagaggaagataactcaggacgattcctcctatggaaatagcaacagctgttgcaaatatctgcttcagtgccgtaaatctcagttcattatcaagaacctccagcatctcatgctctgcctgtttcaaatcacggatggatccttcatcattgaacagactgtaataattcctgtatttggggtaaaaatttacttccatggataccacaaaatttatagtggtgatcagaatacttaaaaatgccatcagagctggcacatcatggtaaggcgcaccataaaacaatccctgaacgtgtacctgtaatggccccatccacataatgacaagatgagaaaaaagccccagatttacaaacaggcctgtaaatgccagagggagaaactcgtctacccacgctaaaaacgcgaatggtttctcttcactttgcggaaaataacggtacaaaagcacaacatcccagataagcattacacagtatccaaaaaatacagctgccatcataccttcctctgccggaaatcccaggcagagaaatagaaaccccagcagaaatgtcacaagaacggctgcaacaaatgacagcatgatccctttataatctttgatcgctgtcaaatagttcattgccatccagcagaccaccagttcaccaaacaatccaaaacagagaagctgtagcaccggtccgatccctgcaaacagcaaaaagagtccatacaagataccgccagctgccagcaaaatcccggttgatccccaaaaagaaggaaggatcattgtttttctatcctcataaagcatgtccgccagaaatctggtaactgccatggaaaaaaaactggtaactgtaagggaaccgaggagagcataggtgatcatacagatgatcagctccctgctatgttctgatacattgtatagattgcagagaaacattacactcagcagaaggagaacacctaacagcatcgggcctgtacagatcacacctgcatatccatatgcacggaaagatgcgaaaatcccttttctgcgaaacagtttttttaactcaaatccgattcctgccaatctcttctacctctctatacagctttctatacttttccatcatatattcatgccggaaatacttctccacacgttttcttccgctttctcccatcctcagtctcctgtttcttgaaagacacattttttccatcgcatcagccagcccttcccgatacatcggcggcacacaatatcctgcaagtccaaaaggatcaccctgcttaccttccaacagttccctgcaacagccaacatctgtacagacacagggacgtcttgctgccattgattccagtacagacaacggctggccttccgatatacttgtcaggatcgtaaaatccagcttttccatatatttttgaatatctacccttccggtaaaaatgatattttgaagttccatctgtttaaccagatcataacattcttttgcatattcttcatcatccacacctcccaggatatgaagccggacatgttccattcttgaggaaagctcataaaatgcatagatcatcgtcttgatgtctttgatcggggccagacggaccactgcgccaatatccacccagccgtcttcttcctttaatgggatttcacaaaaacgctcataactgaccccgttctcaatcacccggcacttttcaggggcacagccgatgtcttcctgtatcttcaaggcatttgtaaacaggcatgtcacccggcatgccctcttatagatcacatcagagagcatgtagaaaaaacggatccactgctttttaaatgccggagcaacccaggatgcacggatgatctcctcctcccgttcccttgtgtaaatgccatgttccgtcagcatcagtggttttttatatttccagcttccaagggatgccagaagtcctccgtaaccagtagaaatggcgtgatatgcatctgcctggggtacaaatgttccaagaagatagagcaccgggagcatcatcgaacggatcgtatgaaatgcatccgcaaaggcaatatacggatagcgctcttcacagatcgtttccagaattcttaaaaatgcctcacttttcagataggacatgggattgatctttctctcctggtacagacggaacaaaatctcccagtcagggcttttgcagtccatcacttctcccagcgcacattcctcttccggcgaaaaacgtacataccgtacaccgttttcccggattttcaatgcatcatccagaaatacttcgtgaatttccgtcacattatccggaagatcataaacaaattttcccttctgttctgcttttgcgccaatgacccacagcacaaattcatgttctttcataattgtaatatactgatgcatccatgttgaaacaccgccatgaacataaggataacatccttccaaaatcaaacatattttcattgcatcacctgtccgtcttcacctgcacttcatcgctgtctgcgcaaagaagatacaggctgtctgtcagctgttccattgtcccacctgtcactgccagcggcttttcttttgaaaaccgcacaaagaaatacgctgtatcatatcggttttcaatatgaaaacaaaatccgtctgctgtacgttctttctctgcggctgccgcgctgtagcgttggatcgcacctgaaagttccgatcccgtcagatttcggagcaaaggagcagacgtataaagccagcccatatatctgtccagattttcctttaacgtttcccatccaagtgctgctccacggtcctcatccagaagatcatccgaatgcataaaatgagtatttacaaaatgcatattcagttcggaaaaggcacaaagctgcatataatcatcgatcactgcactggaaattatccttggctgctccacaattccatcttctgccacttcaaattcctgttcgtatgcgaattcacctgtaaaatagttgctggcaattgttctaatctccgggcattttgccgccaacagctgccgcccctcttctgaaagaacattggatggcggaacatacacactcatggaagcctccggatacatttcccggcagaactgcaaaagttctgtcatggcattttccattgcctccgtatcagcccatgtattatacggaagaatgtcaccatactttacatttccaagggccagtggctgatgattatacccatgatatcctatttctcctccgtgacgcagaagcatatttccaaaatactggaacctggatgtttccatctgatgttcgattaccccgtctgtttgatccccatagttttcaatcacaactcctgtatatctaacaccatatttttccgccagggccaggatatccggccaccagatgtttgcataaaaatctctgacatttataccataatcacggtatatatactctccgtttccacccggtaccggggaaggaaaatcatccagataaaaagcagatccattgataaccgggtagatggtacaatctgacagaagactgtatgcagctgaaaaaatacctctgactgcctttacatatattcccagatttactaccacaaatttcccagaaccataatcattttcccagaccagagggattttatatttcccgctgctccaggcatacagctttgccctttcacttaatgttatattccatataatgcacggataaacaggaatttatcctttaacagtgcattttcttcatttgcaaacgcaatatcttttctgtttttcatctggctataaccacatacagccccaaccacgaaatataaaatatacggcagccagttagatggttcataaaacagtgtcaaaccgtttatgccttctctgatgtaagaaactgtcagagcacagactgccagaaaagctgccgctaccccttcattcaatccataaatagatccaatgatcaccacatacaaaagacgtacatcaatataacgaaactgtacagaatttccaagaactctgtggaggatttcagaaaatccgaaaaagagaaggatttctccccatttaatgaccgcggcatgacctgtaatcctgcttaaaataagtctgtaccagttttcacgtttctgccttctatcaagaaaatcctgatactgatcctttaaatcttccagaatactgatcttcggaaaccagccatattttttccggatcgtattcttttccagattctctttttcaatcatattcctgctgtccggtacagtcttcacagttttttcccgtttttctgaacggtctgcttttagcgcaggaaacaattttaagattgcagtttccagttctccctaacgaatatggaacacatccgggatttcaagactcctgtcatcctgatcccagttatcaaaaatacgaaaaatcagttctcccaggtcatccagatacaaaaaatcagccatatcctcattttgttttggaaattcaggcatctttcccttttccagtgactgaaaggtcttgtacagccagtctttactgtatcttgcagaataaaggcagggagcactcacaacctttaacgaaacgcctgctttctcccgataatacctgcatatatcatccgccatatttctcagaagcagattgtctcctttcccgttttcatttgtaatatataagaactggatcgcgcgtcctctgcaatactccaaaaggtggttgagagcctcgatttccccactgttttttgcacctaacgataaaaagccggaaaaatatacaatacgatccagctcatattgttttaaatcaatctcttctgcacgatgttcctgaagtcttaaaatgggaacttttcccttatggtatttaaattgtgtatcaccacagatcaggacatgcgtcccgagaaaagtctgttcgatccattctcccgttaaatatcctgtgtttcccgctaataatatttccatcttcctgccactttcatcatccgttaaacttaaaacgccattattgtacacctaatcaccgttccctgcaactatctgtaatatcaaaaaaacaggcaataaaaagttttaaaaactcttcattacctgtctttatctctgatattccatacagaccaaactaccagctataaccccaccagatacaatcctaactctcctacttttttattctatatgcagcatatatctatgtcattgaactatcggtttaaaacgtaaaaaaataggtataccagaatatatccgacatacctataaatttacatagctacatttctataacttgtttcacaaactgctcaaagtagcccgcatcaaacacttcactttccaaacatttacctggtgcatattctttatttccttaccaaaactgctcatataaacttggtaaaatacctttcgtcaccgttaacacgatcatctcaagaatttctttctccgatgtctgtgaactttccaattgccaccatttcaccgctgtgagaatattagatgcaatgatctggctgaaatagactgctttcttttcactgttgggatgaatatgatagttttcacaaagttcctcaaataatgcatggctgtaaatcatatgcatttcatcaaaaatattaacaggaagcgtctgccgcgccatcattttcaaaatcgctttcttctgttcaaaaaaatgaaggattggcgaaaaatacgaaatataattctctttttttccatttaaagctataaatcccggatttattgccttttggaactggacaagcaattcatccgctatcttttgaatgagatcatatttatcctcataatttctgtaaaacgtagagcgattaatctgacattcctggatcagctgcttgatagtaatatcctgaaaacgacactgttccaacagtctgataaatgtcatctggatattttgtctggtctttgttactcttaaatcttcgctcatatctctcctctgcaacattttacctttaaaagttgcatatgcaattttttctcaacaactgtttcttgtttaatttttcacattttattacaattcattatatcaaaaatttacgtgaaaggaaaagaaaatatggaaaacaagtattatccacatttatttcaaaaaggaactgttggcggtgttgtcctgaaaaaccgaattgtccgcaattctatgggaacttatcttggaaatcctgacggaaccgtaaccgaccgtcagatcaaagcttatgcccaggcggcagatggcggtgccggacttatctttatggataacgcagtcccggttccaatggtatcctgcggcttacgggcagacaaggacgaattcatcgcaggtcttacccttcttgctgaaacagtaaaagaacatggggccgttcccggcattcagctggctcatccgggccgagatgctgcttttgtcggcagcgcagatgtcattggtgcatctgaaatcacttttgagccatggtatgaaatgggctataagatgccaagagccctgacaatagaagaaattcatgatctggttgaacgtttcggtgacgccgcagtacgatgtaaaaaagctggttttgaaattatcgaaatccacggtgctgccggatgtattccgaccaatttcctgtctccccacgataataaacgtactgatatgtatggtggctctctgcacaaccgcatgcgtctgctcctggaaatcgtcagaaacatcaaaaagaaatgcggtccaaatttcccggtaggtgtcaaattaagtaccgaagactgggagccagaaggaatacgtattgaagaaaccattgaggtagcaaaggcattggaaaaagaaggagtatctcatctgaatatcatgggtggaacccatgcaacagcttccagagaattcctgctgccaaatgcatttaacgccaaacacacaaaaatgctgaaagatgcagtaaacattcctgttttcatcggtcataatattttctctccagaagatgctgaaaagatgctcgctgaaggaaatgccgattttgtcgctttaggtcgttcacagctggcagagccggcatgggcaaaaaaagcaaaagaaggcagagccagcgatattaaaccttgtatcaactgtctgatcggatgtatcgacaggggaatgttgagccacacaccgatccattgtaccgtaaatccatccttataccgttttgaatgcaaacctgttgaaaaagcagaaaccaggaaacaggttgcagtagtcggagccggtcctgcaggctgtgaagccgctcttactgcttcaaaacgcggacatcaggttacaatctatgaaaagcgatgcatcggcggagcgatgattgaagccagcaaaccggaaaacaaagccaatatcaaacggttgatccactattatgaagatcatattatgcatgatccgaacattacactggtaaaagaagaagttgaatatgagactctcgttcatagcggttatgatgcagttatcattgctgtcggcggaaaaaccagaatattaaatgtacctggaattgagaaaaactccgtcatttatgccagtgattatttaaatggctccacagcagtaacaggaaatactgtagttgtgatcggaggcggcatcaccggtgcggaaaccgcgcttgaattaaatgccgaaggcaaaaaagttactatcgtagaaatgacggatgcttttcttgcgaatttcagttccgcttgtcaggcatatcttgcaacgatcaatgaaacagacataaagatcctgactggcaaacgcctgaccgctgtccatgaaaacaatgtcattctgaccgatcgatggggtaatgaaacaacggttccggctgacagtgtagtcatcgccgccggttttaccagccagaatgaactgagcgataaactggaagaaaatacagatatgcaggtattcaatgttggagacagcaaacgcattcgtcagatctatgacgcaatccatgaaggatttattgctgcaagacagatttaacaccattgcgcccactctgtctttcttgatcaaatccaactataaacgaccgtcggatgaatattccggcggtcgatagctttttcacgatttattcaggtttccttttcttttttagatttattatctttcttttccgtacagacaaagctgccagctataaccccgccaggtacagccctaactctcttccaagagtctgggcaattccaatgctttgtccgggcagtgatgttgtatactgtacaccaaatcgccttccactgcagttacctgtagcatataaaccgggaattgattcaaaatcacggttcaagacctgctgatgttcatcgatctccagtccgctgactgttaccagtatttttaaagactggccacctggtctgtggctgtcttttattataccgcttcacttcttttaggaaatcttactctgtctccatctgctctttccgctttctttcttcaaattcttctttcattttctgaagaaattccgggtgttccagaatatccatacaggttccggctaagatctcagagccggagcgcagggcttcgtgggctttttgggtttttccggcttccagatattctttggaatgggctgcagttccttctggtacaaaggcagtgcggatacagcagcctggtacttcatacatgacatttccaaaatcggtggaacctgttttttctcttgggcctgtgatctggggggcctggaagaaatgggcattttccatgatcaggtcatttaatgttacacaggggatctttgccttaaacggatagctgcgctcaagatcgcaggtggttcccgtcatcaggcatgcacctttgataatatctttaaaccggggaacgatcacattttccagataatcggtgctgtaagaacgcagtgtatactctgcttttgcccgtcccggaacaatattggatggaccgcctgcatccagaattgtataatgcatccgtgagtcttctaatacatgctcacgcataaattcaatggcctggaaagagagaagagctgcgtcgaaagcactctttcccttatgtgggctcatagctgcatggctttctaccccgtgaaaagtcacatagaagcactccagtgccatgcatcgcagatcaacacaggttgaaggcgctgcatgcatcatcagtgcaatatctatatccttaaaacagcccttttcctgcataatgatcttgccgccaatggtttcttctgcaggtgtaccatatataacgatcttataaggctggtctttgcaggtatcgcgtagtgccagggcagcaccgatcacagatggcccctgcatatggtgtccgcatgcatgtccaatatctttcagggcatcatattctgccagaaggccaaaagatggtcctccctgtccctgctcataaacagcccgaaatgcggttggaagtcctgcgatccctttttctacctgaaatcccattttttccagataatcagtcaaaagaccggctgatcttacctcttccattcccggttctgcaagatcatatatttcatctgttatcttgaccagttccggcaaatactggtcaaccgcctgttttatgacttcttttttcatgtatatactcctgttaaaattcctgttctatttgtttctgtaattttctcagttccgttaccattcgatttctctggcgtataaatgtggtatggtaaaacagttcccagtctttcggacctttttgaaagttcccttttgctgatgcgccaagtaaatgtaacggaccgtatgcaaaggaggtatcctgttcatatgcagatccggaagaatgcatgagacggctgattactccgcctgttatcctgcagaggcggttgtgatcttctaagtgtattggttcacctttctcctgttcttctgtgttccattttttctccagatccacgcataactggatcactgtttttaactgcttctgtattttctcaatttcttccccatacttagaagaattttttaacggttccagatacccattccatgtatgaaagtattcagaaaaatctgcaggaagcatttcttcatttaaaagtccgcataagagagaacgaaccactgccccatcccgcatcaaaccatcaaaatcgatcttgtcaaaggtatcttccgctgtatgccaccagtacacaccaggtccaggtgcatctgactgttttctttcttttcttgcttcatatcttggattgatatgataagggatctctgctccccagaaagactgatccgcaccgcggccaatccgtccgatctgaatctctgccagtggatctgcttccattacatgttctttcagccattttgttccttccaaaccggcggtccggatggcaagggtatggtccgcgccttttgaaccaagaagatccagatttacatgggcaatacagttttcatataattcatcccagtggtgatcacagtaccaggttgaacccatataccgtccattggaatgccccggccaccaggcaatttttaaagaataggcaagctgttccttcctatcctggaaatatctgacaagttccagagccagtgcattggcagtaccgttgtcaaaagcacctctgtaccaggtatcataatggcaggaaagcaggacaaaatccttttttctgcctggaatatctgctatgggaagctgcacgctgcgtactccagtatctacctggctgtccagatcggcatagaggatctgtccatttttccgggcattttccagtttctggatcagatactctcctttcggaccagatatcgccaccaccggcatcttaagctgaaacagggacgagtccatatccggtgttccccagacaggactgactgtatcctcatggatcacatcttctccggaagtccagatctggatccatccggcagctccatactgttccagtatttttgcataccgctcatcataaccatatcccaacaccagctttccggaaacattttctaaaaactgcttctgtctgtccatagaaactgcttctctggttccaggatcatacaccaggggaacatgaagggattttcctgtactttcagaaaaagatctgggacgactgggaatttcttttccatctacggtcaaaacactttttaccggattacttaaataagcaggaaatgtttctgtatggcaggagactccgtatttttttaatacgtctgaaatataggcaactgcctgaagtgcttccggttctcctgtcagtttatcaaaggaacacaaatattccagatgtttttttaaccgttctttctcttccatttttattttccctcctgttaccgttatctggttccgttatttcccaactgtttattaataaccaattccaatggcgcccagcataaacaggcagcctgcaaatgtccagatcaaaaacaaaggcatcataaatttcagccactttgcataagggatcttggaaacgatcagatatcccattaatgcagaggaagttggcagaacagagttggaaaatccatcacctaactggaatgcaagaacagctgtctgtctggtaattccgatcagatctgctacaggtaccattaacggcatggtaacagctgcctgtccggtaccggatgtgatgacgcagtttaccagtgactgtgctaaaaacattcccacagcctttaaggactgaggcattgtatttacaagacttgcaatggcatgaacgatggtatctaagatcagggcatctgaaagtgccatttccacgccgcgggcaataccgacgatcagggcgcctactacaattcccttcgctccggccccaaaggtagaagcgatcttattcggactgtaacggttaataatgccgcagacaactcccatggtaataaagatcgctgacatttcttcaaaataccagtccagtttacttaaaccatagatcagggcggcaaaacctaccacgatcactcccagtgtaagaccgtgtgtcagagtcattgcctcatctttatcatcaaaaacaaattcattgtcatctggttccccatagataatgctcttggcagggtctgcttttacacgttttgcataccaggtaatataaaccgtattaatgaccagcaatactacaaggataaataatctgtatcccataccggaaaacatggggatttccgcaatatcctgggcaacaccaacattaaatggatttaagataccagcagtaaaaccggaagccgcacccatagcgatcatagctgtacctgttactttatccagtcccagtgaagtggccagagcaattccgatcggtacaaagatcataacttccgttgacattcccatggttgcgccaaaaatggaaaacagtaccagaaaagccgggataacaaaaaattctcttcccttaaatgcttttgacatttttttgcataaaacagtcagcacccctgtggaggtaatgatctcaaaagaacctccgatgatcaggataaaggttactgtacttgctgctttaacgatcgcccggtagattaatgaagggattgaaaaaaagcttaccggggctgactctacatagtggaaactgcctgcttcaacaagggttcttcctgttgcctcatctgcataccgggtatactctcctgccggtacaacataggttgctgctactgcgatcaggatcagcactacaaggataacaaatgtatgcggagcctgaaacgaccttttttcttttgtcttttccataattcatgccctttcttgataatttttatttcttaaactataatgaataaataaaattaaatcaagtttaatatttttaatatttcatttaatattatttatttttatgcatagtatacagatatttatacattggaaggaaaaactatggatatgaaggaacaggtttacatgcttgctattgaaaaatataaaggaataaaagatgcagcccagtctctgcatatttccccgcctgcactgagtatttttttaagtaatctggaagaacgcagcggtgtgcatttttttgaccggatcgggaaacagtttatacctacccaggcgggaaaaatttatctggaacatgcaagaaaaatgataaacatacgagatgattatgaagacgaattaaagaaatatatacacggttcctctggaacgatccgctttgggatccacccaagacggactctttatcttctatcccaggttctgccacgtttctctgccaggtatccggatgtggagctgattccttatgaagcttcttcggagcgtatggtagaacttctcttaaatggggaactggactttgccattatcaatctcacctcggatcatccgcttttagaataccacttattatatgaggactatatggttgcggttgtagctgccgatcacccggtctgtaaaaaaatgggaccctcttccactgatgatgatcctgtattgatcgatctgaaagaatttaacggtgaacgttttattctccagaaaccggagcagtcttccagacattatacagatctggcaattgcccatgatcacgcagaacccggaagcatttttcttttggaaaatctggagtcttctgcccagttagcagcagagggttatggaatttcctttaatttttaccagtatatgagacgtttccattatccaaaaccagtacgctgttttcggatcggaggttccactgaaaaaaccatatattctattgttacattgaaaggaaaacataccattgccccgatgcaggaactgatcggactcatcaagcagtttgcttaaaatcgttaagccgatagagcagacgtagacagactatcaaaaaggagccgccagggggcgactccttttgatatgcatgtgcagcaaccattcggttgtcaataatccgcaaaaacggatcaactacagcataatatacttcaatataaataatactgccagaatataaagcagtggactgatcttcttctcttttgccttaccgcataccaggttgatcactacataggagataattcccatagagataccttcggaaatgctgtacatgaaaggcattgcgataataccgatatatgcaggaatggactcggtataatcattaaagtcaatcttcaggatagaggagatcattaaaaatcctactacgatcagcgccggtgcagttgcaaaggacggaatcgcaaggaagatcggtgataagaacagagacagtccaaaaaggattgctgctaccgcagcggtcagtccggttcttccgccttctgctacaccagaagcactttctacgaaagtagttactgtagaagtaccaaacatagcacctacagtagtaccaactgcatcagataaaagggcaccgcggatccttggaagctttccgtctttgtccaacatgtctgctttggaagcaacaccgatcagtgtccccagtgtatcaaacaggtctacaaacaggaatgcaaatacaactgcaaagaaatccagtgagaacatgctgctgaaatccatcttcatcagggttggtgccatacttgggatagcaataccattggaaaaatctgggagcagactataggctcctgcttctggatttacctgatagatacctgctaactggcagatgatacctaagatccaggttgcaaggataccccagaggataccgccttttacctgttttaccagtaaaacagctgtgatcaggataccgatcagtgctaacagaacagtgatgccctctgtggagaatgtaccattctgaacagatgccttaaaggaataaagacctaccagcgtagcaccgtctactacgatctttgcgttctgtaaaccgataaaagcgatgaaaagaccgataccagcggatacagagtgctttaatgtcataggaatggcattaaagatcttctcacgtacattggtcagtgacagaaggatgaaaatgataccttctgcaaatacggctgttaaagccatttcccatgagtatcccatctgtaaaactacggtataagcaaagtaagcgtttaagcccatacctggtgcaagtacaaatgggtagtttgccataaatgccatacataaagtagcaaacaaagctgacactgcggtggctgtaaagactgcaccgctgtccataccggtagcgcctaagatacccgggttaacagccaggatataggccatagtcataaaggtggtgattcctgctaacacctctgttttgacgtctgtgtggttctccttcaggtgaaacaatttttccagactcataaaaaatcctccttctcatgtattgatctctgataactaccagaaacctgttcttcttcctggcattttttagaagtcccctgcctcctttcccccgattgccagaaatccaaacgtttttatacatgcattttagcacttttttaatgttttgtatatacaaaataaaattttaaattgccaaagagaaaatcttattgtataaatctgatttttttgtctattaatctacattttttcctactgcaaaactttttacaatctctgtaagaatgttgaccgtctgttccatagactccacacatacatattcatattttccgtgataattatgtccacctgtgcaaaggtttgggcatggaagtcccatgtaggacagtctggcgccgtctgttccgccacgtaccggggaaataaccggagtaactccattttttctcatagcattttctgcaatgtggatcagttccatatgtggctctatcttctctttcatgttgtaataggagtcttttacaacagcagttactgtaccggccccatattttgcatttaaaaactctgctgctttttcaaaaaatgccttcttctgttcaaatttctccctgtcatggtcacggatgatatatgccatctgggcgccttccacatcaccttccatatggtctaagtgataaaaaccttcgtagccttctgtatacataggattttcaaatgctggaagcagtgcctggaattccatagcgatcagcagggcatttttcatctttcccttggcgcttcccggatggatgccttttccctggatggtcacatggccggaagctgcattaaagttttcatattccagctcccctaaagcacctccatctactgtataagcggcctctgccccaaagccttctacatcaaagaaatctgctcctcttcccacttcctcatctggtgtaaaggcaatgcagatcctgccatgtttctcttccggatggcttaaaaaccaggctgccatggtcatgatctctgccacacctgctttatcatctgctcctaacaatgtagtgccgtctgtagtgatcagtgtttttcctttataatttttcatttccgggaaatcggaagtaagaagccagatatctttttctttgtttaaacagatatcaccgccatcataattttccacaaactgaggctttacgtctttaccagaaagagccggtgatgtatccatatgggcaatgaaacctaaagaagtaatcttttcctctgtatttgccgggatctcgccataaatatatccatgctcgtccatgcgcacattggcaacacccatttcctttaactcagtagtcagaagttttccaagttctaactgctttgttgtacttggaacctgttcgccctcttcttttgactgggtatcgtaggaaatatagcgtaaaaaacgttctgtaacagaattttctattattttcatttcatcgtcctccaaaatcatatttattaagataattttaccacggatccgctcattatgcaaaaaggacagccggtctttcgatccagctgtcccaaatgaaagcaatctgctttcgtacatcttttgtatatcttatctgtttgccagttcctctgtgatctcttcccaggtaacacctttttctgccattaataccatcatatggtacaggaaatcggagatctcgtattttacttcctccggatccgggttcttggctgcaataacgatctcagtagcttcttctcccactttctttaagatcttatcaattcccttatcaaaaagatagttggtataagaaccttcctttggatgttttttgcggtctaagatcacattgaaaacgtcctcaaatacttttaatggattggtctctttgtattccttttctgccagtgtggtgtagaagcaggaacggttgcctgtgtggcaggctgcgccgatctgctttacagttgcaagaagtgtatcattgtcacagtcgatctttaaggattttacatactggaaatgtccgctggtttctccctttacccactgcgcctgacggctgcggctgaaataggtcatgcggccggtagccagcgtattgttaaatgcctcttcattcatgtaagctaacattaatacttcattggtcttataatcctgaacgatcacagggatcagcccgtcgctgtttaacttaaagtccttccagtctacggaagattcaaaggtatctacggaaattcccgctgcctttaaagactgtttaatggtcatggaagtatccatggcatcctctgtaaaggtaagaaccgcaccgcagatatttccgcagccaaaggcatttttcaggctttctgctgtgtccttggcatcatcctttgcctgtaagaagaataaaaatggtgcttcactgtcgctgatagaagccatttccagtaaagagggaacgctgcctgctgtattaagaagcatgacggatgcacctgctgccttatagtcctttacatgatccagataagcatctgttggcagataagcgtagatcttctcttttccaaagcggtcagatgcctctttgatcatatccacgttttcttctttgctcatgtctaaaaatacagcgctggctcctgcataaagatatttctttacatcttccatgcgttttactctgccgcctgcaatgaccggggcatccgcttccctgcagacctctttgatcactgcaatggcagcctcatggtcatcatctgttacagaccagtcatagatcagaatttcatccgctccgttatcgcagcagtgttttgccatctgaggtgcagcctgggtataggttctctttccgtcccagctgctgatacggccttcctggtagccaaaacctgcgatcagttttttattatccatgtccatttactccttgtccgttcatttttcaaaacggcggactgcctcttccaagtccacacgtttttcataaagagcttttcccatgatcgctcctgagatccctgcatcataaagagcctgcaggtcttccatacaggatacgccgccggatgcgataatgtcaagtcctgtttcttccgtcagcttctttgttgccgggatattggggcctgaaagcatgccgtctctggaaatatctgtataaataatgtgctttacgccatattctttcattttcaggcagagatctgtggctgtaacagtgcttacctgctcccagccctggatagctaccatgccgtccttggcgtcaacgcctgctgcaatggcatctgcaccgaatttctccaccatatcttttaagaactccggctcttctactgcctttgttcctatgatcacacgctttacgcctaaagcaagcatatttttaatggcttcctcagaacggataccgccgccgatctctacagggatattcacagaagaaacgatttttttaatggtctcttcatttacagaacgtcctgccagtgcaccgtctaagtctaccagatgtaaaaaagtggctcctttttcctgccagagagccgcgatctcctctggatgctccgaatataccgtaatatctttaaatgcaccctgacgcaggcggacacattttccatttttcatatcaattgccggatacagctgcatgttttgtctccttttctattcctgaataaatgtttttacaggctttttctacaggcttcccttggtagataatacatctgtaagccggggatcataaccggttgctccgtctaaagctttcgcaaatgccttaaaagccgcctcaatgatgtggtgattgttgctgccggacatctggcgcagatgaaggttcatttccccgccgtaagatactgcatagaaaaactcccgcaccatttccgtctccagatcacctactttttcccggtcaatgtttaagtcatacaccagataaggtcttccgcaaagatccagggcgcagatgactaaggcctcatccatgggaaggatctgggaaccatatcggcagatgccttttttatcccctacggccttgcggatggcctgtcccagcacaatgcctgtatcctcaatggtatgatgggtatccacttccagatccccgtctactgtaagatccagatcaaaaaagccatggcgggcaaagctgtttaacatatggtcaaaaaagccgatgcctgtatggatattggcctttccgctgccatccaggtttaaagtcatgtttattttcgtttcattggtatttcgtgtgatctgcgcaatgcgttccatatttcctacactctcctttatgcggacctttttactcatgtttttggcgagtcccaaggtcaaaaatcctcctgcaagcaagcttgcgtcggatttccgaccttttgaccctggtatcattcaaatctgactcttacagaatttgcatgtgcagtcaggtgttctgcttctgcaaagtcctcaatgtccttatgagccttttcaagggcttctctggaataatagataatgctggatttcttaataaaatcatctacacctaaaggtgagaagaattttgctgttccgttggtaggaaggatgtggtttggtcctgcaaaatagtctcccaaaggttcagagctgtattcaccgataaagattgcgcctgcattgcggatttttgtcattacctcaaacggattagctgttactaactccaggtgttccggtgcaatgttgttggctgtctccactgcctcatccatagtatccactaccaggatatagccgtagttatccagggatttcttgatgatctcgcttctggataatacctgaaggaaaccatcaacttctttggagaccttctcagccagttccatactggtggtaactaaaatagcactggctaattcatcatgctctgcctggcttaacaggtcagctgccacatatcttggattggctgtttcatctgccactaccaggatctcacttggtcctgcaatgctgtcaatgcttacatgaccgtataccgctttctttgcaagggcaacgaagatatttccaggtcctacgatcttgctgactcttggaatggactcagtgccgaaagcaagggctgcaatggcctgtgcgccacctactttataaacttcggttgcaccagccagatgtgctgctgttaaagtaacaggatttaccttgccatcttttccaggaggtgtgaccataacgatacgttttacaccagctacctctgccgggataatgttcataagtacagaagaaggataagcagctttgccgccaggtacatacacaccggcactctccaatgctgtgatcttctgtcctaagatcgtgccgtccgactgggagtcaaaccagctgtttcttctctgtttttcatggtaacggcggatattttccatggatttcttcattacttccagaagatgtggatcaacagcttccatagcctctttgatctctgcctctgttacacggatgttgtctgcattgatctctgctttatcaaatttctttgtataatcaaaaacagctgcgtctccttctgcttttacccggtctacgatctcctgcacggtttctgtgtatgcatcataattatttgggtctctttttaacatatctgccagaatatttttcatagatgcttcatctaattttacgatcctcatttgtccgccctctctttttcctttaaaagtccctgaaaatctttaatgatctttgtgatccgttcattttccgttttcatgcttacctgattgactaccatacgtgcggaaaggtcacagacctcttctaagactaccagtccgttttctcttaaggtagaaccggtctccacgatatctacgatcacctcagaaagccctacaatcggtgccagctcaatggagccgtttaatttaatgatctctacagtctggtatttctggttgtagaaatagtcttttgcaatgtgcggatatttggtagcgacacggatcagttcgtggtgttttaaacgctctcttgctgactccggtccgcagacgcacatcctgcattttcccattgccaggtctaagacctcatacagtcttctgccttcctctaaaatggtgtcacggcctacaataccgatgtctgccgcgccatattctacataagtaggaacgtcatttgccttggctaagaagaaacggatgcccaggtcttcatttacaaagatcagctttctggagtttttgtccttcatctcctcacaggaaatgccgatctgttcaaacatatccattgccttggatgccagacggcccttggctaatgctatggtcagatatctcatgctgctttatctccttttatatccaatatgcttttatgctttctggatcttttataagatctccctgactccgtatgcagatacaggggtttcgtctacatttcctgtaagcatgtcaaaggcagttactgtatttcctgtatccttcaggcagagaatggtgcgaagacctctcttctttgccattcccttataatcttccaagctctttccttcttccatgaccatggactgcaccggagtaccctcggaacggaagaaacggcttaaacgtaccgcactttgtctggctgagggctcatacaggatcaccgtatttactaactgcaccggaatgtggatctgctgtctggataaagctgccatcagctggtctactacaatggcgaaaccaactgccggagtatcttttccaaactggactaacagtttattgtaacggccgccggtaacaatgtaatcgccggttccataggtatatgccttgaaaatgataccggtataatactggtaacggcttaacattcccaggtcgtaagatacataatcagccatatgatattcttccagcaaagtatgtacccgctccagccgctcaatggctgctaatgcctgtgggttatctgttaatgcttttgcctttttaatctggttgataccgccaaacagctctggaagttttaaaaacgcttcttttaagctttcttccatgtcctggttctttaaaaactcttctacgccaaagcggttcttgttttcaatcagatcatttaactgggcctgtgcgtcctcgtccagtccggactgctgtaacaggcttctgtaaaatgcaacctcacctaattctacctggaactcttttaaaccagctgcctttaaacagtcaatgaccatagcgatcatctcagcatctgcatctggtgagtcatcgccgatcagctctgcacctgactcagcccgctcttttaaataaccctgatagctggtattatttttaaaagtgcgctccaggtagcacagacgcagaggcatatcgtcatccataaaatattttgccacacatcttgccactgctggggtcatatccggccggagcaccagcatgttgttgtccctgtcgaagaacttgaacatttcctgggcgcctacgcttccgcggtcttcattaaaaatatccgcatattcaaaacttggggtctggatatgctcataaccgtaaagatacaatgtatggaggattttctcctgaactgccagctttctgcggcattctccgttataaatgtccctgactccttccggagtgtggatcagtttgtttttctttgtcatggcacatctcccttatcttttgccgatataaatggctttgctttttgtcttgctatcactttaccatggtagagtgatgatttgctaacgtgttttcattataaaggcttcattctttcttgtcaacggctttctggatttttcttagccaggctcatggaacggctattgatcgttctccctctgacttagatcaatggataatggttccaggtaatggacatacatatccctatgagaacgtattttccagtttttgtcaatttcatcgtaggtaaaactttttctgccacctgcttccatgcggtcccagaatttttttacatctgtaaaaggcacataatacatttcatctaatgctgtataatgaacaatgataaatgatatccccccctgttgttcaaattcttccataaatttgatctgatgtgggtgaatgttctgaagaggaaatgtttttaccgcacactcttttgcgtcaaaacataccggtattccttgaactgccccaatatagtctacggtactcttctggtcaaaataagccagtgtaatatgacggctgctcttatctatttcaatgggagtaatgggtgtagggatcttctggatcagagccagttttttctccctgtaactttcatttgtatgattgatcaggtcttctaaggtagaaccccgaagcccccttgttttccatgttcccattttatgctgtcctttccgcaaaacaaatgtctgctgcgcagccgcttgttttatcttcgctcaaatactcacgaatcccgcgctatcgcgctccactgtctgctttcgcagacgattcgttcgttaatggctcgccaaaaacaaatgtctgctgcgcagccgcttgtttttgtcttcactcattacattatatcaaatacaattcatatttgccattcttcattttttgcactatactatagagaaaaaatatcacttaaatataatcacacaaaagcgaggtattgtatggaaccatcaaaagtttattttactgattttcacaccgttgcctttggtgacggacttccaaccaagttaaagaagctgatcaaaaaagccggtatcgaaaaactggatatggacggcaaatttgttgctattaagatgcacttcggagaactgggaaatatcagttatcttcgtcctaactatgcaaaagcggttgcagacgtagtaaaggagtttggcggaaagccatttcttactgactgtaataccatgtatccaggaagccgcaaaaacgctttagagcacctggaatgtgcctgggaaaatggatttacaccgctgactgtaggatgtcctatccttattggtgacggtctgaaaggtacagatgatgtagatgtgccggtagcaggcggggaatatgtaaaagaagcaaagatcggccgtgcgatcatggatgctgacgtatttatcagcctgactcattttaaaggccatgaaatgactggttttggcggaactatcaaaaacatcggtatgggctgcggttccagagccggaaagaaagaccagcacagcagcggcaaaccacacattgagcaggatgtctgcaaaggctgccgcaaatgccagaaggaatgtgccaacggcggtctgatctttgatgaaactgccagaaaaatgcatgtagatcaggaacactgcgtaggctgcggccgctgcctgggtgcctgcaacttcgatgccattgcatttgacaacgatactgcaaatgaactgttaaactgccgtatggctgagtataccaaagcggttgtagacggccgtccaaacttccatatttccctggtagtagatgtatcccctaactgcgactgccatggtgaaaatgacgttccgatccttccaaatattggaatgttcgcctccttcgacccgctggcactggatcaggcctgcgtagacgcctgcctcaaagccaccccaatgccaggaagccagcttgcaaagaacatggcaaaaaaaggtttcgtagaccaccacgatcacttctgcaactctactccagagtctgagtggagaagctgcctggaacatgcagaaaagattgggcttggttcaagaaagtatgaattgatcgttatgtaaatacagttatgaaaaaccgcccggacttgatcggtccgggcggttttttcatatgaccttatataaaaacttatacgatcttttatcgctttttcagatatacttacgcatctgcctcactggaaaatctagctgcctgctctgcgatcagctccttatcttcaaagtagttgatcttcatagcgcgcttcatctctgcaagggtctgtgctgctttcttttctgccttgatgcttccctcttccaggatcttgtatacagctggaatgtcttttgcgatctcttttctgcgttctctgatcgggcgaagttcatcctggatcacgttgtttaagaacttcttaaccttaacgtctccaaggccgcctctcatataatgagcctttaattcatccaggttcttgtaatctggcagatatttttcaaagtgctcatcacggcagaatgcatccagatagataaatactggatttccttctacctgtcccggatcctgaacgcgcaggtggttcgggtctgtgaacatggacatgatcttcttcttgatttcttcttcggagtcggacagatagatgcagtttcctaaggacttgctcatttttgcctttccgtcgatacctggcagacgcagacatgctttattgtctggaagcaggatctcaggctctaccagattgccgccgtatacggtattgaacttgtgaacgatctcacgggtctgctcgatcattggagcctggtcttcaccaaccggaacggtggttgccttaaatgcagtaatatctgctgcctggctgatcgggtaggtaaagaaaccaactgggatgctggtctcgaaattacgcatctggatctcggtttttacagtaggattacgctgtaatctggatacagttaccagatccatatagtagaaagtcatctcgcaaagctccggtacctgggactggataaataaagtggattttgcaggatccagaccacaagccagatagtctaatgctacctcaatgatgttctgacgtactttttcagggttatctgcattatctgtaagagcctgtgcatctgcgatcatgatgtagatctcatcaaactgaccagaattctgaagctctactcttctctttaaagaacctacataatgtcctacatgaaggcgtccggttggacggtcgccggttaatatgatctttcccattgtattttatcctctcgttatataattgttacagttatatgaattagcataccccaaagccacttttctgtcaagaatttgactccgctgtctccaatccttctccttttaataccttcttaaaagcagcaggcaaaggagcgataaactcttttcctgacagataatccagaggctgtgccagcttttccggcatgacaagtttccaggaatgtaaaagctgggagcgcactttatatttcttctggatctgctcattcaactttggatctccatacttaaaatctcctaaaataggatggccaatagaagccagatgggcacggatctgatggctgcgcccagtgatcagagtgacccgcaaaagtgttgctgtatcactgctctttacaggcacgtattccgtcataataggaacactgccttccacttctaacggatagatctgcaccgtattttgggcttcatctttctttaagaaaccggcgatcatctggggcttatcgatcttgcctttgacgatacactgataatatttatggatgctcctgtcttttaagaccccgttcatgatctgaagtccggctaaagaagttccggcaactaccagaccactggtattgcgatccagacggttgcagatcgaaggccggaacgtgcgcagctggcttaccggaagatgcccggagtcaatgagataatttaaaatgtgctcatttagggaaacatccccttcttttgctttctgtgaaagcattccggaaggtttatttacgatcaaaacatttttatcttcgtatacgatagatatctcctgttttttcttcctgtttccattttccccgtttttcccggcttttcccgaatttctgtctttttcttttcctaatgctgccagttctggaagaggcgccgaaaacttttcaatggtctcatctgccagaaacagactgatctcatccccttcttccacccgttcagaaccatcacacttctttccatttaaggtaatgtttttctttcgcatcatcttataaagaaagccttttcctgcctggcttaaatatttggacagcagcttatccagcctctgtcctgcctcattggaggccactttcagtttctgcattttaccaacgatcctttcccggtaagtactctatcttttccatcatatctaagatcaggctgtgtggaaacacttttgcaaggatccagaatgcattcataaaaagcccatagacagaaatttctcttcctgcaatgctgtcccggattgcttttgccacaacctttcccggtgctgccataaccagttttttgtataatggaatttcacctgttgtctgtgcaatatcaaaaaattctgtgcgcaccggtcccgggcaaatggcagttacaaatatctttctgccctttaattccctgtttaatgcccggctgtagcttaacacataggcctttgaagctgcatatactgcaaagcccggctggggcagaaaggctgcactggaagcaaactgcaggatgcggctgttctgagacataaaaggaaggaccatggtggtaacagctgtcagagcagtacagtttacctgcaccattcctgactggtctttttcagacagatcacatacatttccgatctttccaaaaccagctgcatttaccagaaatttcacctggggtttcaagcgttctaactcagcttttaagatctcccgttctttttcctgactcagatccagaacaaatttgcgcaccggaatatttactttttcttccagttttaccaggcgctcttttcgtcttcccactgcccagatctcatccagtcctggaaactgctcccataagcggatggcgcattcccagcccattccagaagatgctcctgttataacagcaattttcattgtcagtttcctttctttttatgaacgtttcggatgccttttttcttacctgcagttttcgctgcattcatcttgcttcctgacagcttttccatatttctgccgcttgcgcctgtatttcttccaccagtattttttcctgctgtattcctgttatttccattcctgctgttttcattcctgccaaccgcattcttgccgccggaaactcccccatgtccacgaaactctttctcatcatgagcgctcttatcaaaattcctcggcttgatcagacatttcttatcaaagccgatcagatccgttcttccggcaatcttaagagcctctgccaccaggtcataatttttcgggttccggtactggatcagcgctctctgcatagccttctcatgaggattaacaggcacatacaccttttccatggtacggcagtcatatcctgtataatacatgcaggtggaaatggttgacggtgtcggataaaagtcctgtacctgctccggcatgtagcccagatctcttaaatactccgccagctccaccgcctctttcatagaagaacctggatgggaagacatcagataaggcaccagatactggtcctttcccagcttctcattcatctgcttgtattcttttacaaactctctgtatacactgtttttcggcttgcccatgcgcatgagcaccttatctgccacatgctccggcgcaactttcagctggccgcttacatggtattcgcaaagttcccgtaaaaacttctttcccggatcctttaacagatagtcaaaacggataccggaacggatgaatactttctttacctttgggatcgcacgcagctttcttaagagtgaaatataatcactgtggtccgcacgcaggttcttacatggttcagggaacagacactgcttattagggcaggcacccttagtcagctgtttttcgcaggcagggaaacggaaattggcagtaggtccgccaacatcatggatatatcccttaaaatcaggctcttctgtaagaagttttgcctcatccaccaatgactcatggcttcttgcctggatgatccttccctgatggaaagtcagtgcgcagaagctgcatgcaccaaaacagcctctgttgctgattaggctgaatttgatctcacggatagccgggacgccaccggctgcctcataagaaggatgatagcttctcatatatggcagagcatacacatcatccatctcatcctgtgtcagtggctttgcaggcgggttctgtaccacataaactttgccctcataaggttccaccagacgttttccggaaaacggatctgtattgctgtactgtacaaaaaagctttctgcgtaccgtttcttatcttctaacagctctgtatagtccggaagcagcttataatcataaacagactccaggctctttgtcttataaaccgtaccgtctataaaagtaatatccttaatatccagtccgctgtccaatgcatctgccagttccacaatggaatgttctcccattccataggaaataatatctgcctgggcatccagcaaaatggaccgcttcatcttattggaccagtaatcataatgagccagacggcgaaggcttgcctcaatacctccggcaatgataggcacatctttataagcagaacggatcaggttgcagtataccaccactgcatagtccggtctttttcccattaccccaccaggagtataggagtcctcttttctgcgctttttggatacggaataatggtttaccatggaatccatatttcccgcagacaccaaaaatcccagtcttggccgtcctaagatctggatgctcttattgtccttccagtccggctgggcaatgatacctaccttataaccatgtgcttccaacagccttgaaataatggccgttccaaaagaaggatggtctacataggcatcaccggaaacatagacgaaatcgcactgttcccagcccctttttttcatatcttctctgttgatcggtaaataatcatgtaccatttataaaacctcgtaaaaatcatggatcagccggtcagccagctgttccttttcttctttcattgtctctgaaaaatcatcttctactgcaatgaccttcattcccgcattttttcctgccatgataccggccggaacatcctcaaataccagacagttttccggttttgcgcccagccttcttgccacctccaggtaaatatccggtgccggttttccggctgccacttcacaggcagtggcaactacctggaaatattgttccagtcctaaagactttaatacagcatctaccatttcccttccgttgctggtagcaatacctgctttaatgccccggatggaaatttcttccagaaattcccttacccccggttttacaggtacttccttctggtatttttccagagacatttccacccacgcctgtttaatctcttcaatagagtctggcagattaaaacgttccttaaaatatactgctgtttctgaaaaactcattccctcaatggctttttgcagatcagacgggcattccagaccataacggcccagatattcaacatcaatggcttcccacatccacatggagtccaccagagtgccatctaagtcaaataaaacagcagaaatgccgtctaaaatatgcgtccgttctttctcattgatctttcgttcaagagccttaagctcttcttcctttaatgcccggtactctcccggctttaaagacggatccaataccagcggccccatggtcatacgttttaagtataccactttacagcctaaaacttcaaacatcctttttacctggtggaattttccttcatggatccgtagtgaaactgcagtcagtccctctttcattcccgccggcgggtctaatatgaccagctctgcaggaagtgtttttacaccttcttctattataaggccttcctgcatctgctttttggcatcctttggaagtgttccctctatgtaagccaggtatattttatctacatgtttcttcggagacagcagctcatgagccattgccccgtcgttggtgatcagcagcagtccctctgtatccagatccagacgtcccaccggaaacaggtccttgcgcaaagcagcgtcgatcagacttattacagtaggatatttcccatcctctgtagctgatacagtacctgccggtttatttaacataaaatattctgtgtgtgcataagaaaccggctgtccgtccagtaagaccacatctttttccggatctatttttccatccgttgcctttatcacagttccatttacctggatccgtccttttttcgccatttccttgatctggctgcggcttccttttcccatttccaccagaaatttgtccaggcgcatactggaattagaagcttttttcttcttttctgccatatttcatttatcctctcttactgccagcgccagcctgcatagtatttatttttaagggtcattccattgcctttggcccagcctaaaggaaagccttctactgtaaccagacaccagccctttaccggttcttcctcatttacaagactgatcgtttctccttttaaatagcggatcacacgttcatcctctgttttcagatcaaggcgtacctgatattcgtctttttttaatgccattgcaaacgcctgggatggttcaaaacgacctttctttaactcacccagatgcagccctgttcgcaaaaaccgcagcggaagtcctgtttttaagccctccggcagataatatacctgctcatcccggatatagatacggcctaaatcccattccttcctgcagtttttcagaaatttcatcagatcttcctgtttgcctgcttccttggcccgctttgaagcctctttttcatctcctgatagcctcaaaacagctgcaccactgccagaaccattttcatcctctttcttgtggaataatgccaggaaatgtccttccccctggatccggtgtgggaacaggcgggcagtctgtggatatccaaaaccatccgaaagtcccttaaactgctctttatcaataggaaccagttccatggatggatatttttctaaaatatacgccacattttcctcatcttctttttttgagaaggtacaggtagaataaagcatcattcctcctggttttaacatggccacagcctgctctaagatctccctctggattgagctgtaataagaggggcctctgcttacccagtcctttaccatatcctcttccctgcgaaacattccttccccggaacatggtgcatctactaaaatcttatcaaaaaactccggccatacagctgccagttttcccggttcttcacttaaaacagaaatattttctgctcctgccagttccaggtttttaagtaatgctcttgccctggaataactgatgtcattggatacaagcattccttttccctgaagttttgctgccagttccgtactttttcctcccggtgccgcacatacgtctaagaccttatctcccggttctaccggaagcacagccgctggtgccatggcactgggctcctgaagataataaagaccggcataataaaaaggatgtctggcaggacgttctgtgtcttcataataaaatcccttttccgtccagtctacaggtgtcagttccaggtgggaaagatttttaaattcctccggcataattttcaatgtatttacacgcagacctggtttccacgcttcctcatagctttttatatatgcctcatattcatctcctaaaagctgttccatttcctttaagaacgcttccggcagctgtttcacatctgtcatatcctgctccttatacatgctactacttaaacatcatttttcaaaagatccggccatatattaaaacaaaccctgcatttaaccggaggccctatgaaacggatcctcttaagccttctggccctgttctttcttatcctgcttttgctctctccgggtaccgctttggaaggtgccagaaagggactccttctctgggcttacacagttttgcctactttgctgccttttatgatcggaaccggcgtcattgctgccatgggcgctgtaggtcttgttgtaaagcccttttctcctttattatccggagtattccacttttctcagcctgcaggcttcgtttttctcaccggactgttatgcggctatcccatgggggctaaaatggaccgggacttattagaaaggggacagatttcctgggaagaagcctgctatcttctctccatctgcaatcatccaagccctatgttcctcaccggttatacagtgatggaaggacagaagctccttccaccttccataaaatttcctctttttcccttccttgcagccctttatcttccagtttttcccatttcttatctggcaaggcattattatgataaaaaatccaaaaagaacaggaagatacgtccttctgtctggtccggtgtctctcacacagcacccatttcttccttctccctggatgagcacctgatgagctgccttgaaactatggaaaaaatcgggctttatatcatgctgttttccatcttatccctgtatctttttaagctgccccttcccggccctgttattttaaaacctgctcttatggggcttttagagatcactaccgggatccaaaccatctgcgaacatacatccggtctcactggtctgctcttagtcactgcaagtgttgcttttggcggtatcagcggtattttccagacccgcagtgttcttacaatgcacagcggcagaaaaaatgccggactctccatccggcattatatcttctggaaagcccttcacagtttactttcctgcgtattcttttggattctcttaaaaatctgatccctttcagaaatttaagcttcttccttcttttcttcctgaggtgctgcctgtgcttccggttcctgctgtacaagaccaccagacagttccttacggttgttggttacaatgtcatagctggactgcatggaactcataaaggagtcaaaacgtccctttgcagtttccatggtatgatccataatattctgaaggctgcgcagcatatcgtctgtatactggatcgcaccctggcggatattgtttgcatcattaacagctgcatctacgattgcctgagcctggacatttgcctgctcaactacttcgtttgcatgtgcataagcacgctgcatgatctcatggtcattgaccatctcgttggtctgtgcatccgcctgtgctaccatagaattagcctgttcggttgcctgctctaccatggtgtttgcctgctctgtagcctgtgcgatcatggagtcagactgtttctttgcgtctgccagcatagactcagactgagcctgggcatcacttaaaatggtctcctgctggctgatgatcttctggtatttcttgatctcatccgggatacgcatccgaagctctactaacagctcttccatttcttccttattaacaatgatcttgctgttggacagagcctggaatttacaactgtctatgtattcttcaatttcactgatcaactgttcaattctgctcattttatcgttctcctttggtttattacgtgtatctattacatactctatacgtttttcatctcttccagcttttctttcacccgttctacaacaataggatgtaaaaattctttaatatcgccgttaaattctgcgatttcttttacaatactggaactgagataggaatatttcaaattcgtggttaaaaatatagtatcgatctccggcgcgatcactcgattggtctgcgccatctgaagttcatactcaaaatctgtgatcgctcttaatcctcttacgatcacatttgcctgattttgacggacaaaatcgatcagaaggccctgaaaagactgcacctctacatttggaatatccgcagtcacttcctttaacagctccactctttcctctgcagtaaacaatggtgatttggaacggtttttcaaaacaccgatgatcactttgtcaaacatcttagaagtacgctgtataatatcaatatgtcctaatgtaaccggatcaaaacttcccggatatactgcgactctcatttatgcccccttgccagcaaatatatgcttgttggtcttgtatactttttcttttatcatatgaaagcctgcgtcagaaagccagtcaaaatccgtttccttggaagcttctataatgatcagagtatcttctgtcaccataggtgaactggaaagatattctaaaacacggttttcaaattcatggttatatggcggatccataaaaataatatcaaaccgtggatttcttccctctaattttttcagtcctgcgatcacatcacagtttaacaccagcgctccctcttctaaatgggtgcggcttaaattttcccggatacaggaaactgcctccggattactttccacaaaaaatgcctgttttgcgccccggctcaaagcttcgataccgatcgctccgcttccagaaaacaggtccagaaaagtacagcccgggatctgggtatttaacatattaaataaagtttccttgatccggtctgtggtaggtcttgtatccataccttctattgtctttaaaagcagccttcttgcgctgccagcaattactctcatgtaatataaactcctgtatgagcagcctgtatcgtacttctgctctgttttcattcccaacaagtataatatgaaaatttacttaatacaaggtttttttaaggattttgcattttttaacaatttacgcagaaccttctagtgtattatcttaagatggtcacatactaagaacgtaacaaacaacaagctcttaaaacaaaagagcactttctcaattaaggaggcgttttattatgtctaacaacacaaacaaaacaaacgtacctgaagcaaaggaagccatggatcgatttaaaatggaggtagccaacgagcttggagtacctttaagcaacggttacaacggcaaccttacctctgcacagaatggttctgtaggcggctatatggtcaagaaaatgatcgagaaccaggaacgccagatggcaggtaagtaaaactccttagtgctaagaaaagatcaccccaggcaggattttctgtccggggtggtttttttgacgccattttttctggaatattatcttacaagttcaatttctcataccggtcccctaaataagagtctacctggcgctttaattccagatgttcttctttttccagttccgggtcatcatccagtatttcattgacctcttctgaaacctgctttaacaggtttgcatctgtgaacacatcgccaatacggaattccagatcaccgctctggcgtacaccaaaaatatctcccgggccacgcaatttcagatcttctgacgcaatatagaaaccatcgttagaacggtttaagatatccaggcgttccatagtatcttttccgccggagccattgaccatgatacaataagactggtgactgcctcgacctacacggcctcttaactggtgcagctgagccaaaccgaagcgttctgcattttcgatcatcatcacggtagcatttggcacgtttactccaacctcgataaccgtagtagacacaaggacctgaatctctcctgccgcaaaccgttccatgatcttattcttctcttttgccttcatttttccatgaagatattctacattaacggactcaggaagcgcatcccgcagtgttttagaataatccagaacattttccccttcgatcatctcgctggcttctaccataggacagatcacataggcctgacggcctgcttctacctgtttttcaataaaagcataggcttttggccggtagctggtatctaccacgcagtttttgatcacctggcgacctgcaggaagctcatcaattacagagatatccagatccccatacaatatgatagccagtgtacgggggatcggtgttgcactcatgaccagaacatgaggtgtatgtcccttttcacttaaaagttccctctgaccaacgccaaaccggtgctgctcatcggtgatcaccagagccagtttatcatagatcaccttttcctggatcagcgcatgggtgccgataataatatctgcctcatgggaggcagttttttcataggcgatccgtttttctttggctgtcatggaaccggtgataaggacaacttttttatcaataccgctggtttcaaacattttcgtgatggactcgaaatgctgtcttgccagcacctccgtaggcaccatcaaagcgccctggtagccattttccgctgctgcaagaagtgccaggatggcaataaccgtcttaccggaacctacatcaccctggactaagcggttcatcacacagcctttttgcaggtctgaaaatacttcctgcaaggtacgttcctgggcagaggtcagtgcatagggcagcgactcctttaagcgtcctgtctcttcaccgggccggatcacaaactctgttttctttccttccctgctctcttttaaccggcgcactcctactaaaaacatgaaaaactcgtcaaatacaagacgttttctggcaaataaaagttccttctggtctcttggaaaatggatatgctctaaggcataattaatctctgccaactcatattttctgcgtaaaaaagcaggcatatattcccgcttcatctgtctgttttccagagcctgtttttctgcttttacaatggttttattgcttaagcctcttgtctgtccatacaccggctgcatggaatttactactgtttcataggcttcttccgtaaagacttccggctgctccatcatcagacggccccgtttttttactacttttccccggaatacatacatctgcccgcttttgatattggcgcgcatataaggcatattataccacgcaagctgcagcgcacctgttatatcacgaacataggcagagaccatctggatctttcctgtacgcagaaggtccggcggctttggaagggcggctgccacgctcatgaccatctgctcttttaactggcctacaggcacaggcggctcataggtatcataagctcttggataataggaaagaaggtcatcaatagtgatgacccccagcttttcaaataattttccggttttctctccaatccctttaagggaacttacaggctcactgttactcatttctttgcctgctccagtgcatttaaacctaatttgatagcacccatgataccctgatcatcatgaagacttgcaggaacgatataatgatctatatcctgtaattctttcgtattgatatatcctgctaccattgtctttactttctcacggatcagtgtaaataactgttcctgatgcataacgccgccgcctaaaatgatcttctgtggtgaaaggatcataatataatctgtaattgcctgtgcaatatagtagctttcgatctcccacacctttggatcatcttttaattcaatggctttcttgccccatcgtgcttcaatagatgggccgcttgcaaagccctcaaggcagtttttatggttcgggcagatgccgcctttttcatcttccggatgacggtttaacaggatatgtccaccttccggatggagcataccgtgaagaagtcctccgtttacccatacaccaacaccaacgccggttccaatggtgatataaacaacactgtccagtcccttagcgcagccatatgttacttcgcccaggcaggaaccatttacatctgtatcaatccccataggaacattcagttcttttttcagaccgccaaggagatccttatttctccatgccagctttggtgtttcaaggatataaccgtaattatctgctttcggatctactcccacaggtccgaaagctccaattcccagcgcttcaattcccttatctttgaagtatgctgtgatctttgggatagtctcctccggcgtagtagtcggaatggaaacctgttcaatgatcgttccgtcttctcttcccagtgcgcagaccattttagtgccgcctgcttctaatgctcctattaacatatttttctccccttgatctcatatatttacaacagcccatccttaccggacgggctcttgcattcaaatatcccacaaatgtggtttactgtctgctaacgcagacggttcattcgccaatgactatcatctacgtcttcttcctacaaaacgaagtagataaacaaacaggttgataaaatcaagatacagctgtaatgctgcaaaaatagaagattttgtagccatttccggaacatttccatagtagctgtaaaatgcctggatcttctttgcatcataagcagtaacaatcaggaaaatgaaaataccgatagcgcatacaactgtctcataagcagacagattgataaacatggacaacagccagaaacctgctaaaaagatcagtcctgccatcataaatggacgcagcgcagagaaattgatatttccaaaatatccgatcagcgccataacgccgaaaaatgcagcagtaatagcaaatgccatccataaagatactacatcaaatacaaggaaataaacgctgaatacaataccgtttacagctgcatacaggaaaaacatggttcttgccatacctactgtcatctggttgatccgtgctgacaggtatacaacgatgccaatctctgcgataaacaagatgtagtaccagcctggtacccggcttacataatacagaccatctgtcatatacattccaattgctacaccaaatgtaataaggagaccgataaacatccaaccaaatgtctttgctgtatatctgccaaggctgtctccataagccgcttccttgtagccctgttccattctgaaatcttcgttcataaacgatacctccttatagtcatatgaaccggcagtttattctgctgaaatcatataatagtagataggctgtccgccatactgaagttctagttccttatccgggaataaactttctgcctcttccttcagtttctcggcatcttcttctttaacatcgcagccatagtaaatcgttaccagttcgctttcatcatctaacattgcctttaaagctgccttagccgcttcttccggagaatgttctactgccagcatacccttgtcaccgatcgccataatatcgcccttttcaatatccatgccgtcgatattggtagtacgcactgcataagtgatctgggcagtctttacacgttccatctcagctgtcatattttccaggttttcctgagaagtaagatcaggcataaagtttactaatgctgtaattccctgaggaacagtctttgacgggataacgatgatctccttatcctcagtcagatctcttgcctggtttgcagccatgataatgttcttattattaggaaggataaaaatgtgatctgcatttacatgagcaatggcatttaacatatcctctgtacttggattcatggtctggccgccttcgatcagataatcagtgccaattcccttaaagatctcacttaatccatcaccgcaggatactgcgataaaaccgtattctttgcgctctgtctgctcttccggctgtgtctcttctgtttttgccgcatcagcctgtgcctgctcttttgcaagacgttcagagtcctggatcacacgttcttcatgctcttcacgcatattgtcaactttcatacgggataaagaaccgtaggtaagacctttctcaaaagcaagtcccggatgattggtgtgtacatggatctttacgatctcatcatcagaaacgactactaaagagtcaccaatagaacctaagtatttcttcagttccgcttcgtcctcatcggtgtattctttttctaatttaataataaactcggtgcagtaaccaaatttaatatcagctgtatcaatatcggttctggaagcgccgtttcctgtctgtacagccggctttgcctctgatgcatgagcagaagctgttccttcttccagtgtaaaatcggtaactttgccggtcagaccatcaaaagcacccttgatcacctgcatcagtccctgaccgccggagtctactacacctgcctgttttaatacaggaagcatttccggagtcagatttaaaactctgtcaccttcctcgatcactgccttggcaaactcttcaatgtcatctgtttctactgccatttccagagctttgtctgccattcccttggcaacggttaagatggttccttcttttggcttcataactgccttataagcagtctcggttccgcgcatcatggcatttgccagtgtggtaacgtcgatctcatcaacggttttgatttcttttgtaaatcctcttaaaagctgggaaaggataacgccggaatttcctcttgctcctcttaaggaaccggaagagatggcctttgccagctgatccatagaaggattttcaagtcctgctacttcttttgctgcagccatgatcgtaagggtcatgttcgttcctgtatctccatccggaactggaaatacattcagctcattaatccattctttcttggccgcaaggccttttgctcctgccagaaacgcattttttaccattccggcattaattgtacttatacccacaggttacttcctcctagtcaatcactctgacaccttccacgaagatattgatcttttctacctccatgccggtgaattcttctactctgtatttcacgctttcaattaagttgtcagatactgctgatatgctgaccccataggatacgatcacatgaaaatcaattgatattttattttccttaatgtccacattaataccatgggtcagactttccctttttaaaagttttacaagtccgtctttcatgcttacagctgccattccgacaataccgaaacactccacagcgatggttcctgcatataaagcgatcacatccgggttgatctggatctcgcccattttattgctgattcttcccttcatatacgagcctcctatctttttctagtgacagtatacactatttcactaaaaaaagaaataaatttttattttttcgcttgcaaattttgatagtttctggtattataccattgttgtggatttttctactataaaatccaagtaacgtttaaggaggtgcaatagtatggctaagtgtgcaatctgtgaaaaggcagctcattttggtatcaaagtgagccattcccatagaaggtccaacaagatgtggaaagcaaacgtaaaatctgttaaggttaaagtaaacggcggaacccagagaatgtacgtatgtacttcctgcttacgttcaggccttgtagaaagagcttaatttttgaacagagcgtgaaaaatcccggtagcttcggttaccgggatttttttgcgttatacatttgattacatctgctcctgccacaggcaggaatgaatgacaggtctaacagcaaaataaattatagcctaaaatcaggcatccgatcacaaagaaaaaggtaaatatggtttccgggacaaagaaaagcactgccattccaagcccgaagcaaaaaagcatcagtccccagactcttttcatagaaaaacagctcccttccattttattttatgcggtaagggagctgtttgatgctttttatatcaggcttttttaccttcgtaagaagctgctgtttcttttgcaatgcctactgtttcttctgatacagccggttttcctcctaaaaagcggttgatcagatccggagccatatcgatcaccttggtcactgcatcctggttctttacattgaccagcttggtcacaccattctggatcaccaagacagcacttggactcatcttggcgctcattccgccacagcctttgtctttctgctttgaaccttctgcaaaagcgcctgcagccataccacaggtcacatcgatcagcggtataataatggtctctcctacctggaccggttctcctacgactgttttcgtagttacaaactgatccattcctttaaataatgattcaattgtagatgtaaaatgattttctgccataatatacctctattctcctgaaatattctcccgtagatcttaaatccccaacttactcacgatctaaaaaaccccgtatcatcttccaggtatgtttgtgacgatagactccccaaaacagccataaaagataggagacccggacacgtcctttaaaatttccttctgcttccaggcacttttcatcaaataccggctctaagtccaggcttttatagataaacggatacaccagactggctccctccaggatctgccctgtataataaggatcatccagtccaaaacggatccttccttttccccagcccggccatacatgtgccagaagcttttttgcctgggtaaaaagcaattttaaggactcctgattcttctcatcctccagccattctctcttttcccggacaaaagttttaatatcttttagcttatcacaaaaatgcttaaaagaaaacttaagtttttctaagaaggctttgatttttcggatccactggtgtgattttttctcagcaggttctatcttgtcttcttcttggtctgcttctgctacttttatagccttttcctgcttttgcacaggttttgtttctggttttgcttctggttttgtactggactttttctcagcggttttctctggtcctgcttttgactgtgtctgtgtttttggctctgccgtatgttcagtctctgtttgcacctttgactccgcctttggctgttctgtcttttgctgttctgtctttgacttttctgcctttgtttccttcgctgtttccgctttatccctgcttttggctgccgcttctgtcttactttcttttggaggctctgtctgttcttcttcccccatgctccaaagtttcagccacagcacccgcagcgatgcctgaagccctttctctttttcataagaaccgtttacgcagatcgccgaaagcagccaggatactctcacccggccccatttttcttctttccacgatccgctgatctgataccttacaggaacaaaaaggacggtacacaataccagaagcaggagcccaaaaagaaccagcagtatgatccccagaatttttaatataagcaatacaatatgcaaacgcctgcccccttactgctcctgccagtctccatattcagcacctaacttttccggaagactttccatataagccttccagttaaaagcacctgttttctgatacatgtcatccaccatagaacggactacctgcgctgcctcctcatagccccttgcgatccccaaaaccagaaagtcttttccatctctctgctgtctggtaagaagacttacaggaagtatatcaagtatatgattgccactttccggcaaagtaatcacataggtatccacaagcatttttccttttctcattccctccaggatactcaccctgttccgggaagcattttcacccatgtataaatgagtccaccagcgcataaaatcccctcttagatcttgttccattttacttattttatttattccatgattgagcgcagcatacgcacacaggcctctttttcaatctcatctgtgcagcattccagactgttccggatataagcctgggcttcatctgaggttttaaaggtgataggaagccgtgacaggcattttgccatagccgctcttgtaagaacctttggaagctctttccatgactgccggatctcttcaaacagctcatctaatttttcactgatcatgctttcatctgccatcgcttcagaagctttatattccagtgaagcaaaggcactgcctgataagagaagttctgttttccagaggaccttacattccggaaggtttgattttgccagttcatccatagggatctcttccccagcgatccactgttcaaaataagtttcctgctttccttctaactgagggagaagatctgcggtttcaaccggtatctctttccactgtttatccagaaatagctttaatacttctgacatgatctctaccatgacctgtgtatctttcagatctgagactgcatgatccccgcaaaggagaagcacatacagatcattgaccagatccattaacatcaaaatatccccggtggcatctgtgatcttttcactgacctcctctaatttagaagaaaggtgataatactctgctgcttccagggttttaaaatccgtctggttaaattcttctaaaaatggatacagttctttccaggactctgtcccctctttcgggcggtttaaaagtgcttcacagcgcaggacatagatcatatcatccagacctgcctccggtgctcctttataaatacttaaaccttcctgaatcagagcaaagaacttgttttttgtaaagcgtaccggcagctggctgactaccagctggaaacgctcatgaaaaccggaaggatctgagtcctgtgtcagataatttaagatctcttccatgaaaacatctgtattttccggcttctttcctactagctgaggcataaatctgccttctacccggttcattacatattcatatgcctggaaaatgtctgtataagcagtcagtttttccatttccttgatggtatcctgacgcagctcctccagttcttctaacagagtttctttctcaaaagtttccttcttttccagaaatccttccagaaaagaacctaaagatcctaaatacctgtcataaagagccagtgtctcctctgccggatcgctggtcttttctgccatcatttcatagcaggtgtaaaaatttaatgtcatacggataaaagaataattataggcagccgtaagacgttttttgatctttcttaattccattttaatttctatcccttatcctttcaattgtctctttttatcatctgaaaatacattatgcttttaatacacagcggcgtaccaggtccaaagccttcatcatagactgttcccggatctttcctctgtttcccttaaaatgatactccagcacttctgcctttccctttacagcgcaggccatgtatacaagacctactggtttttccttgctaccgcctccagggcctgcaagaccggtaacagccacacaaacatcggtctgggcccgctctgctccgcccagtgccatttccagggcagtttcacggcttacagcgccatgtgcctttaaagtttcctcttttacacctaaaagacgtactttcgcttcgttagaataagtaaccattccctgcataaatacatccgaaacgccggaaacatttacaagacgggctgcgatcataccgccggtacaggactcagccgtagccatagtcagatgctttttctgtaaaaggtccactacagccatttccagagtcacatcttcctctgtggtaaagatgcagtcaccaaaacggttaaacagttctgccattacaggcgcgatcagcgcttccccttcttctttggtaactgccttggcagtcagacgtacctgtacctccgcagtcttggcataggttgcaatggtcgggttggtctgtttgtcgatcagatccaggatcttatcttctacctggctttccccgtatccgcagatctttaccatatgggaaacaagctgggaattctgtcttttttccagataagggaacacctgtccctcaaaaagaggatacagttcatttggcggtcccgggagcagaatggctgtttttccatttttttccatgatcagtcccggtgccataccattggggttatccagaacaatggatccgtgaggaactgttaccattttccagttattctccgggatttccctatagatattattcttaaaatacgcttccaggcaggctctggtatgagggtcctcttccagttccattcccatagcttctgcacatacttcttttgtcagatcatcttctgtaggcccaagtcctcctgtgacgatcacaatatctgaacggtcaagggcagtttttaccaccgccatcatacggtcataattatcgcccactgttacctgataatacatatccagtcccaatgaggcacatttttctgccagatatctggcattgctgtttaaaatgtttcccattaagatctcggttcccacactgatcagttctgctgtcatgttttacatgcctccctttgtaagcacctctacgtttttcgccacataatctaccagtgaaacaatggtcagtaccacagctgccgctaacatgataaaagtaacggtctttaaagccgggatattgaatatcataaggatcactgcgatcatctggaatgtagtcttaaacttgccccagtagctggctgcgatcacaatgccattgtctgctgctaccagacggaaaccgctgataataaattcacggctgataatgatgatgactatccatgcaggcagctgtcctaactggatcaggcagatcagtgcagagcatactaacagcttatctgctaaaggatccataaattttccaaaatttgtaacaagattgtacttgcgggcgatctttccgtcaaaaagatctgtaaggctggcaacaataaagatcacatttgcaacaacacgcatggtctggctgcttccgttatcatataaaagagctgctacgaaaaacgggatcaggatcacacgcataacagtcagtttattcggcagattcatgatatacctccccgatcagatcatattcattggcaccggttacttttactcttacaaagtcaccggacatcagcatttcatctgcatttacaaaaataagtccgtctacgtttggcgcatccatgtaagtacgtcctacataagcaggctcatctgccacttttccttcgatcataacatccaggacttttcctaccatattttcacagtgttcaaaagcgatctcctgctgcagttccattacatctgcacggcgctcttctttcacttcttccgggatctggtccggataggaataagccggtgtatcctcttctgcggaataggtaaatacgcctacacgctcaaattccatctcatctacaaattccatcagttcttcatggtcttcttcggtctcccccggaaaaccgcagataaaggttgtacgaagggcaatatccgggatctcacggcgaagggcaccaatgcgctcttttaactctgccttgtgggttcttcttcccatacgctttaaaatacggtcgctggcatgctggatcgggatatccagatagtgacatactttttcttctgttttaatagcctggatcagctcatctgtgatctcctccggataacagtactggatacggatccagtaaattccagggatctgtgccagttcatgaagaagcttcggcagtgttttctcaccatacagatcttttccgtaaagagtggtctcctgggcaactaagataagctctcttaccccgttttcagccagttctcttgcttctgcaaggagctgctccataggaacactgcggtaaggtcctcttaaatatggaatgatacagtaactgcagcgtttgtcacagccttccgcgatctttaagaatgcataatgtccgccggtagtcattacacgctttttcgctgtttccggcagttcttttaagtcatggaagcaggaaatatgttcttcttttttctctttttcttccccaaacagacgggtcagcacatttccgatctcttcataagaagtagttccaaggatggcatccacctccggaatctcatcaatgatctcctgtttgtagcgctgtgcaagacatcctgctacgatcagggcacggcattttccttcttctttgtaacgtgccatctctaagatcgtattaacactttcctcttttgcatcaccaataaagcagcaggtgttgatcaggatggcatctgcctccgtctcatcatcggtaaaggacacgcccagtcctcctgctacgcctaacatcttctctgtatctaccaggtttttatcacagcctaaagatacgcaaaataacttgattttttccatgtattgtatttactcctgatctgtataaattttaaaaaagccatcctttgcacctttacggtacagcagacggcttttatgaagtcttatgcctgttcttcggttgtatccagttcttcctcagcggatggctcctcttccggaaggatctttaccttctgctgatacagctcatcaatggcaatagacagaggcttctttccagctgctcctgctaccattgcgtcatcacctgcgatcagctgtcttgcacgcttggaagctgcaatgacgatggaataacggctctgtactaccggctgctcgcctggttcaatatctttgtttacaacgttgatcagatctgtgtatgatggatgtaacatattacattcccctttcaatgtatttattttatagtgtgatcctattttttatttcttgatcatttttttgcaaaacccttatcatctaagtgatacaggtcttctctcatcttgcttaaaaagtccagatgataggaagtttttctgtgctgcagctggatcagctgatgcatctcctctacgcagcggtccagatcatcgttgatcagcaggtaatcataggcttccataccggaggcctcttctgctgctctggccagtctggcattgatcacctccaaagtttctgtacctctacctaccaggcgcctgcgaagttcttctgcacttggaggagttacaaataacagcagcgcatccgggaaacgtttctttacttttaaagctccctggatctcgatctcaaggatcacatccttgccttctgccattttctgttctacatattcctttggtgtgccgtagtagttattcacatactgggcatactcgaccagcttccgctcatcacgcattttttcaaactgctcttttgtaacgaaaaagtattcttttccgtctgtttctccctctcttggagctctggtggttgcagatatggataatgcgtaattatcataccgctttaacagttctttcatcaaagttcctttgcctgcaccggagaaaccggacacaacgactaaaattccctgatggttcataaaaggcctcctggtattattcaatattctggatctgttctcttactttttcaatttctgtctttaaggcaatggctttgtctgaaattgcaaggtcactggacttggaaagaatggtatttgcttcccggttcatctcctgggcaatgaaatccagtttgcgacctacactttcaccagataaaagttcctgtcttgtattttcaatatggcttcttaaacgaaccgtttcttcatctacacagatcttatctgcatagatcacaacctctgcagcgatcctgccctcatcaatggcggtaccgtttaacagttctttgaccttatcttctaatttctgtctgtattcctttaagataacaggagaacgttcctcaataaagtctacaagtcctgtcatataatccagcttgccaagaagatcttcttttaaatgagcaccttccacctctctggatgcaacaaatttctttgctgcctcttccaaagctgcagaaaggatctcccacaaatgctcttcatcatccggaacctgttccatggtaaggacttccggacatctggaaagggtggaaacctggatatcgttgcggatcccgaattcctcttccatttttttgaaataatccatatattccccagccagggctttattatacttcaggcagagatttccttctgtataatcctcgtaattgataaaaagatctacctttcctctctggatatatttctttaaaagagtacggatcgcagcctcaaaatagttaaatttctttggcatcttgatactcagatctaagtatctgtggtttactgctttcatttctacagaaatcttgtattcatccgtagcattctcgcatcttccgaaaccggtcatgctttttaacatatggaatgcctcactttcattttcctatgttttctatataattcctatataatctttcatattataattcatccgtaaatgcaagtcaactgaaaatgcagtagcggaaacggagcctgtcaaaaattcccatttttttcctgctgtcacgaagctttaacaggaactggtgtacaagtctgatctcatattcttccaacggctctccgccatagaaatatttttccatcagatcatttaccctcagatacagcccatccggtatttccggcaaagtttccctgatcttttcctggatctgttcacttttaaatcccggctgcatgtcgatccccaggatcagcagatgcttatagatcataagaaggagaaattccacactgggaaggctgccattgtcactgattttccggatcctgtattcataatacattctccgcagttctaataccgcaaaaataaattccaaaacaaacaggatcagcaggatcataccccagcctatatctgctgtctttaattctgtctgcttttgattttccaggaacggttcacttccaggaaaatgctttttcagattttctgcttcttctccctcggagtccaaagcagctactttgcgcacctgccccggagactgtgccatattaaggagggcatatgtatcgtaataaaatcccggtgtcacatctaccggtacccatcccataccatccatatatacttccgcccaggcatgaccgtcagaagaagaaaggccgatccagtctccgtgagaattttccgcctgtttgctggtaagaagatatccttctgcatatctggccggaatgtgaaaacttctcagtgcaagtacggcagcagaagtataatatgcggaatttccttcccgctccccctgtaaaaattcttttaaaagatcgtctcccgcagtatcttcctcagaaagatatttattataatacgtattttcctcaagaacagtacggatctgctgtacagccgcatacacacttaaagatgcttcttcctcttctttatgaaacagctctttgatcagaccagacaactgtggatctgctgtaagataattcacatacacaaaatcacggtatactgcctccgactccagatactgcttctgttcatctgtaacaggagcctctgtccaggtatctaaccgctgcagttcccccggcatatccgaagacagctcgctgatctcataacgttttgcgccaaagaaagcaagggaacggcttccctcatctctttcattggtagaattggcaactgcctgggaagaataaggctcatagatatattttctcatggcacctgtatttactacctggatatggttgacccacggtgcatcctccggcaagggatccgtgccgcttcttccagcttcttcataggcaatatactgatgttccggctgaaaacctcttccgttcagccattttaaaaatccccatctatttccgccataagctgcttttgccagaggtttccagctgtcattctcataaacagaaccagtaaaaccctttaaatataaaggtttgatctgttctgtctttactctgagccttggctcgtccccctgttctaaagaagctgcctgcgccagactgccggaaggcatattatcctctccatatcgcagctgttctgtcatctgtgctacgtcctttttcactttcagtactgtctgtgaggtttttcctcctgatatccagagcatgcaaaaaaggatcagtcctgttacgatcgtccagccggtacggcgtccgaaagagccagcatgaaaggcaaacagccatacacctgtaatggaagtgagcataagaacggctccaaaaagggaagaacgtcctaagacgatctccggaacaaacagaacgagggcgatcaggctgatccgagtacatgcctttacactgaccagataccataaaagagccgccagcattaaaagaaagaccagactgtataaaaacagattctgctctgttgcctgtacatttccaaacagacgcactccatcttcatatttttcattccagctgtaaatacagatatttaaaaagcttaaaaatccgtttaatatctgtaccggtcttataaaggtcagtactgccgcaccggcggcaggaataaaaaatgcccatttcttatctttggaagacaagagtccgtatacagcagtcagacataaaacaatttctgctatcccaaaagccgcagcctcaaaaacaaggtcgatcgccgcaatcttaaaccaggataaaatgcttcctgccaccagtatcatgcacaatggcagcgcgtttaaaatatccctgttcttattatttttccctgatgatatttcctgtatcacacccgccatagtttatgttttgtcttcctttctacacaatgatattctgcgtgtctgtggttaatttttctaatgggatctctgttaatacgcacatacctctttctgtagtacgtatctctccctcttcatctaaaatacacacagctgttacacttacatcttttgccagttcataaacctcatccggacaggttcctgcagtaaaatacaggatcctgcggtaattactgtgagatttttccgcaataaggctctttaagcccatcccccgctctttctgaagggaaaggttcatccaggtatccatggtattatcatattcctgctgtcctgtgatctggttcagatatattttatttccggcccacatgcccagataatgagggaccttatgttccatcagtttttcactgactgcggctgcagcgctgactgctcctgataaaacatccggttcatatgtgacctctccagaagtaagacctgcgtcaaacatcaccagaatatcataactggacgtatcacttggttctcttaccagaacggtgtcaaacttttctgaaagtttccagtggatcgttcggatactgtctcccggctgatattcacgcagctcaaaaacttccgttgcatcataaccttttttactcagcgtctgctgtccttcattctggcgtcctttctgatttccggatgccacaggacgcatggatattttctccggataaaccgtcagatgctgtacctgatgaaattctgtctttatacagtttaagccaaaaatatcatagcagcgcacattactaaggctgaggatcgcgcctccgcacatcttcggttcccaagggatcgatataccaaaagaacgtttattgatgtcaagggctaacgggatattcctgttgacctggaacattttattatcataggaaagatctgcctggatcctggctgctgccagacaccgccatctgcttttcacagagatatcgatctctattgtctgtccgagacggcaggcagagcgggtatgcatttccagctccattccattcgtctcaagacgtaaaaagaaacgtaagaccacaggcaataaaatttctattataaatacaccggctgtaaaataagaaccgcttaagaaaaacagaacagctgttgccactactgctgtgccgaagccgatcctgatccttgtcatgcattccacctcttagggtctttcaaaggttttgtttcttttaatatatcctgaaggatctctttttctgagattccctctaaacgggcctggggcttaaggatcagtctgtgggcgcatacatccgtaaatacttcctgtacatcctccgggatcacatagctgcggtcttttaagattgcccatgcctttgccatcttagtcagtgcccagacaccacgtgggctgattcccagttctactaaaggatgttctctggttgcctcacaaaggcggatcagataataaaggatatcatcactgatcttaagagcagaaagatagttctggatctccagaatgttttctgcctgtgcagctacctggatctcttccagagggttggaatatcttctggcctttaagatcttgatctgatcctctgctgaaggatatccaatggaaagacgaaccataaaacggtctaactgggaacttggaagtgcctgggttcctgttgtacctaaagggttctgggtagcaatacagataaacggagtaggtaaaggtcttgttacaccatctactgttaccctccgctcttccatggcttccagaagagcagactgtgttttaggagaagtacggttgatctcatctgccagcagcagattgcacatagcagcgccctcatgatactcaaactgttcattctggcggttgtacatggtaaaacctgtaatatctgacggcagggtatctgttgtaaactgtattctcttgtaatccagtcccagtactcttgaaaaggcaagggcaagggtggtctttcctactccggggctgtcctcaaggagaatatgtcctcctgcgtaaatcgtggcaagaacacgccgtataatgtcgtcttttcccataaaggcttttttcacttcctgaatgacgtgttcagactgttccagtatcataacaaatgcttctcctctctcttttgcgctttttccgttctatagtggtttttataaactttcttctgtatctgagttttcttctgtatctaaagtttcttctgaagacgcatctttttcttctgtgtcttctttatcctcttccatcgatccacctgattcattttctgtctgatccgtatcctccgatggatccgggttttccggttcctgtggctgatccggctcttctggtgcatccggattggttggtgtctccggtatttctggtgtttccggcgcatctggatcggttggtgtctccggtttttccggtgtttccggatcctgtggatcttctgatggctcatccggatcctgtgtggttccatttccctgatccgggtcctgaggaacttccggatctaccggaacatcggcaggaacttccggtattttatccagaacaactgcctgttcctctttttcattcttttcttcctcgatccggtctctccaggcatctacatactcattgatatccggtttttccagacggtccggatgatccggtacctctttaccaaggagagtataaattctttcctcaccagtgaattttatattctcaatcgtatacggagtacaatcatttacgtactccaggaattccggcaggtagttccagtcttcatctacagggaagtcacctgctgcatccatccactcacttacagccgcatttaaaacagtatagtaaatattgctttcgatctcatcatcgctttcatatccctgaatactgtatttccatacatctacataggcatcttcattttcagccgcagcaccttctaactgaaccagtccctctgtttccacgccaaagctgtagaaagttccacgtcccggataagtaagcagcggtacattctcacctgtaaaggtaatagactgcatatctgtatcttcaaaagcgctgtaacctacagaacgaagatcttccgggaattcaatttctgtaaggcctgtccttgcaaaggcatacgggtcaacactaagtcccggatctgcatctcccagatcgctggcaggattggaaaatttaacctctgtcagatccacacagccaataaaagcatctgaaccgatctggaacagatcatcagaaaattcaaccgtacctgtaagaccggaatttttaaaggctgcactctgtatagcacggatatgttccgctacttctgcaggcagtgtaaactctccctggcaatcctgtaaagcgcctctgatcacataggtaataactcgtccctccggcgcctggatctctcctgagaaatcagtggtaccgttaagcagataggtatcatctccatccagaccaaataccaatggtctcgtttcctctgtatctcctaatacaatggcatcgccacatcctattgcatatctggcagccgtttcatctaaaaggcaggctgaggtaacataggtcagtgtatcccttgccatcaacggatcttccagatccagatagcctgtattaaaggccatatagcgaagtcccacaaaggcatcctgtccaatataaatataatcaggtgcgtaacttattacaccttccagtttctcacactgggagaacgcatttcttcctacttttgtaacagtttccggaagttctgccaggatcaggtcaatgcagcccttaaaggcactgtttccgatctctgtcagttctacgccatccggcagatccagttcatctaaagaagtaatatcttccggagcctggatcaggactgcagaaccggcaacatccagatagatcatgccagcttccgtttctaccagttcacattttccaacctgaatcagattttcagcagtctcctcacctaagatctctccccaggcctctacataggcatcacggttgtcttctgatacatagatgaccagattttttgtatccagatcaccaaaggtatctgctgagatctcaggaggcacatcgctctggaaatagatctctgtcaatccttctccgttcaaactttctgactccagaacctctacaccttctgaaatgaccaggcgttccacattcggacatttatcagcagcataggacttaatacgtcttactgtatccggaacgatccataatccgctgttatcactggaaatacggtttaaaaccgtaccaccggaagaaagcactgctccatttacataggtataatctgtctcctccgaagaagggatcaggctgtttccacccagactgtttctccatgtaagaagataatctgcataatactctgcaggtaccaccagctgtgtaccggatatccttcccagattgatatccggaggtgttggtgatgcgaaatttatctttgtcagggaattccattctggaatgaccactctcgtaacatcttccggaatatcgatctcttctaatcctaccggaatacctaaaagttctgtttttgccttgttataaaggaaaccgtccacggaacagaagtacgggtttccctctgccacctcataaccttgtgtaaccattataaaatcatccagcaaagttgtaacagactccgggatatagatctttcctgtaacatatccattgaagttgacctgctggatcccctgggggatctctacttcatccagaaattcactgcacatatgcagaaactgcctgtaaacataattaccacgctcatcaaaatcccaggtcagataaccaccgaaatattccggaatatccacccggtccattggatagatctcatatcttcccggagcctccggtttgtaataatctgtaaatacttcctgctctccattgacataccatcccggaaccacctgaagaagagagtcatacagacccattccccagatattttgctgggctgtatacaactctttcagctcctttaacaggcaaatctcttcatcttctcccagatatacgctgtctaaggtacgtctgtttccagcctcatcttccggtcccattacaaccatcctgcaatattttacagaaaattcatgttcgatctctgtccacgggctgttggcattgggtctaaaataaaaggtaacagtaaaatccccctctgctatcttgggatgatctccaatcttaaaattatcgttatactctctcagacgataagttcccgtaggtgtgtctacatatgcataaacagaacacagcagtttccagtctgtaagtacagcgccccggtaaagttcacctacagaatctgaggaacttataatagaaagtactgcattttcagcctcatccccttcaggcagtccttcacttggaaaatccggaagcgtaatttcttctccaccaggtaaagaagggtcgcttggcagagtaggctgcttggagtcatccgggtaatccgggtctacagtcggcgtatcatctccattatccggctgatccggtgttggggttggtgtaggagtcggatccggcgttggagttggcgcaggtacgtcatttccaccgggtgttatggtattatcctgatttccattggaaccggagccaccaccgccgccagttgaaccgccgccgctgatcgtagtatcaccgctgtcgctgcctgaaccattggaagaagcaggggtatccttatttcctgtatcttctgtagtcagaccagaatgtcctgccggaaggttgaccttttcctgggcatccggcgccaggactacactctgtccttcgggagcccagtttgtaccgcctgtgcctcctgcataatcaaaggaaggatctgagaaaatgtttctggcactttccggatctgcttccatctggttattggccagttcataggcagcttcgtttttcttttcctgaccatagggatcctttgcctccgggtcatgctccagttttttattgtcattttctcccgggtcatttccattttgctgtatattttctttctccgggaacatgatctggttaccctgcaattccctgttttttacaaacagttccggcttaaacaggttacccctctgataatcttcccataaaacatgaaagccgcctgcaacaaggaccagggatacagcacctgctgccatcccttttacacctgctttttttataagactgcccatatttttcttttgctttttcaatattttctccgtccttttaatatcttgccgatctgcacacgcatctcttcaaaatcaatcggtttcgtaaagtgaccattcataccgctcatagcagaaagtctctgatcttctacaaaggcatctgcagaaagagcaaagataggtatctctccagcatcttttcgatccatactccggatctgttttgccgcatcacggccgttcatcaccggcatctggatatccataaggataaagttataagttcccggtgcagaagctgcatatttttccacagcatctttaccgtttacggctacatcgactttagcaccctcattttccagaatgctgactgcgatctccgcgttgatctcattatcttctgccataaggatgtggcatccgttaaaggtgaagtctgttcctgtctcgtcttcctgttctgtttctatctcagaaacttctgcgatcggaagtgtcagatatacgctgaaatcagagcctttgccaagcatactgtcaatgacgatctcaccgcccatcagatggaccagacggtctgtaatagacataccaagaccggatccaccgtactgtttggtgatatcctggctttcctgttcaaaaggcttgaaaatacggctgataaatttagcatccataccttttcctgtatcatgaacacggaacatcaggcttactttgccattttctttctgaagctggcggaatgtaacacggatctctcctttttctgtaaacttctgggcattggataaaaagtttaccaggatctgggaaatacgcaattcatcgccaactatgtattttacatctacatctttcatttccacatagaatgccacgcctttggcttctacgtttttctggaacatgttacgcagcttttctgccagcgccgcaagttcaaatggcttgctctccagctcgatctttcctgcctcaatacgggacatatccagaatatcattgataacagaaagcagatacttggaaagctgctctgcctttataatataattttcagcactatggcctcttaactgaccatgtgccagtgtcagcataccaataataccattcataggcgtacggatctcatgggacatactggaaaggaattctgtctttgactggcttacgctttccgcgatctttaactgttcttttgcagcttccagttctttcttatcttctgttatatcacggaactggaatgtatcatataaaccgtccttactgcgggtaatctccagtctgtaccagcttttcattctctccagataaaaatccgaagtaaagggctgttttccatcccaggaacgatactttttccacagcttccagtcttttcccgaacctactttatccaaaaatatacctatatctgtttttatgtcatcaccggtaacgtcaagctgctgttcaaagctttctgttatgtatacaggatacagatctttacagcgaagtatcattaccggatctccgtttcccggtacaccaaaggatccagaaccgcctttaaacacccctgcggcttcattctgttttttgatctttaactgaaaaaaaccgatgagtaaacacacaccggcaaacaattctacgatcaacagcaaaaacaggcctctgtgttctcccaaccacaccagctgccctgtcacatgctgtataaaattattcataggaaattcctccaatacgcattaatgaaagcatttacagaacttttacattttattataggttatttttttccagtgtacagcagtttttccatattgttgtaatacttttctaatgaaagaaaatgtggtatccttataagagcagtctgtttcatacagtattgcctatttttgatcgacaggagtgaatatacatggcatttgacggtattaccatagcaaacttaagatgggaatttgcccataccatagaaggcgggaagatcgcaaagatcgcccagccggaaaaggatgagttgcttattactataaaaaacaacagagaaaactaccggctgcagatctctgcaagcgcaagtcttcctcttatttatcttactgcaaataataagaccagccctctcactgcgcctaatttctgtatgcttttaagaaagcatattggcagcgcccgcattgtttctgtaaagcagccgggtctggaacgtattttagagtttgagctggaacatttagatgagctgggggatctgtgcaaaaagcgcctgatcgtagagatcatgggaaaacacagtaatattattttctgtaaggaagatggaaccatcattgacagtatcaagcatgtatctgccagcatgagttctgtgcgtgaagtgcttccgggacgggaatattttattccgcagaccattgcaaaggaaaatcctctgaccgttacagaaactgtgttccgcagctgtattttatcctctcctacttctgtgcagaaagcattatacggtcaccttaccggcatcagccctattgttgcggaggaactttgccatctggcttccatcgactccgaccgaagcgccggcgaactgacagacccggaactgactcatctgtatcatacattccagctgatgatggaggatgtcaaagaaggacgtttcagccctgccgttgtatatgacggggatacacctgtagaatatgcttctgttcccctgacctgctatgaaggaaagggataccgcagggaaacgtttgagtctataagtactctcctggaaaattattacgcctccagagataccattacccgtatccgtcagaaatcttctgacctgcgccgtattgttcagactgccttagagcgcagctgcaaaaaatacgacctgcagttaaagcagttaaaagataccgaaaagcgtgaaaaatacaggatctacggagaactgttaaacacctatggttacgagttaaagggtggggaaaaatcttttaaatgtattaattattatgataatgaagagatcacgatcccattagacccgcagctgacagcccgtgagaatgcccagaagcattttgacaagtataataaattaaaacgtacttatgaagccttaagccagctgaccatggaaaccaaagccgaagttgaccatctggagtctgtaagttctgcccttgatattgccttagaggaaaatgatctggtgcagatcaaggaagaattaatggaatttggttatgtgaagaaacgccgtgccaacgaaaagcggccaaagatcacaagcaagcctttccattatatttcttctgacggatatgatattttcgtaggaaagaacaactatcagaacgaagagcttactttcaaagtggcaagcggcaacgactggtggttccacgcaaaaggtattccaggctcccatgcgatcgtaaagagcaacgggcaggcagatctgccagaccgggtctttgaagaagctggtgctttagcagcttattattccaaaggccgtgaaaatgataaggttgagatcgactacatccagaagaagaacattaagaaagtggcaggagctgcaccgggatttgtaatctatcatactaactactccctggtagcttcaccgagatgtgacttaaaagaagtaaaatagctaagcatgccccgtcagatggcggggcataaatcaaaactttatacaaaataaaacagccggtccatcaggcaaacctgacgaccggccgatttattttacttcaagtgaaccaattccgtgcgagaattagttgtacttacgcttacgagcagcttcagactttttcttacgtcttacgcttggcttctcgtaatgctctcttttacgaatttcctgctgaatgccagcctttgcgcagtttcttttaaatctgcgtaaagcactgtctaagctctcgttatctttaacaattacgtttgacatcgctcacacctaacctccctccagttgtgtaattgtgcataatacaactgtttgggtatttttagcactgctatgattatagcataaaattcccatacgtcaagaaaaattttatatttttctgcgttttttgcactttttattcaaacaggcttatttggtctgttcttctactacttctacggctttctttaaggcttcttcaataccagccgggttctttccgcctgcctgagccatgtttggacggccgccgccgccaccacctacaagaccagcaatagccttgatcaggttgcctgcatgagcgcccttcttctgagcctcatctgttacagttgccatcagacttacttttccgtccataacggaagcgatcacaaccacaccttcaccgatcttatcctttaactgatcacccagatttctaagaccgttcatatctacatcagctactttggaagcaagtaccttaacgccatttacttcttttacctggcttaatacatcgcctaaggagtcatttgccattttgctctttaacttctcattttcagagtttaatgccttgatctcgtctaacagggactggatcttagctgtaagagctgcaggagttgtcttagctgccttagctgcttcgtgaagctctgcttcaacttctgcataatgcttcatcagaccgtcagaggtaagagcctcaatacgtcttacgccggctgcgatacctgcctcagaaaagatcttgaagtatccgatggtgcttgtatttgctacatgggtaccaccgcaaagctctgtggagaaatctcccatctttacaacgcgtaccttttcgccgtacttctcaccaaacagtgccatagcaccggtcttctttgcttcatctaaagtcataacttctgttacaactggaagcgcagcctggatctcttcatttacaatatcctctacctttttgatctcctctggagtcatagcagagaaatgggtaaaatcaaaacggagacgtcctgcatctacataggaaccagcctgttctacatggcttcctaatacagtacgcagtgccttctgcagtaagtgggtagcactgtggttcttgcttgttaatgcacggttcttcgggcatacagataaggtaactgtctcgccaatgcttaacattcccttagtcataacacctacatggccgatctttccgccctgtaaatgaatggtctcttctaccttgaattcaccgtttgcactgtggatggtacccttatcgccctgctggccgcccatggttccgtagaatgtggtctggtctgcgataatggttcctctctggccatctgttaaagcttctacgatctcatcttctgtagtcagaacagagatcttggagtctacatctaatttatcatatcctacaaactcagaggtgatcgcagcgtcaatagactgatatacagttacatctgcgcccatgtagttggtagtcttacgagccttacgagccttgtccttctgctccttcatagctgctgcgaagccttcttcatcaacggtgcagcccttttcttccaggatctccttggtcaggtctacagggaaaccataagtatcatacagcttaaatgcattctcaccggaaagagtcttctcaccggcagctgccatagcatcttccatttcagctaagatagcaagaccctggtcaatggtcttgttgaacttatcttcttcttccgtcagtaccttaaagatcatggactgtttctcttccagttccggatatccgtccttggaaagttcgataacagtcttggaaagctctgcaaggaacttgccttcgatgccaagctttcttccgtggcgtgccgcacgacgcagcagacggcgcagaacatagcctcttccttcattagaaggcatgataccgtcagagatcatgaaggtacaggacttgatatggtctgtaacaatacgaagagaaacatcggtctcatggtctttctggtattccttgttagaaagagcacatactctgtctaacagagccttgttggtatctacagtaaacagggagtctacatcctggacaacaactgccagacgctccagccccatacctgtatcaatgttcttctgcttcagttcggaataatggccatgaccgtcattatcaaactggctgaatacgttgttccatacttcgatgtaacggtcgcactcgcagcctacggtacatcctggcttaccgcagccgtacttctcacctctgtcgtagtagatctcagaacatgggccgcaaggaccggaaccatgctcccagaagttgtcttccttaccaaaacggaaaattctctctggtgcaataccaatctccttgttccagatatcaaatgcttcatcatcatcctgataaatagaaggatacagacgatcaggatctaagccaactacttctgttaagaattcccaggaccagtggatcgcttctgtcttgaagtaatcaccgaaagagaagtttcctaacatttcaaagaaagtaccgtgacgtgcagtctttccgatattttcaatatcacctgtacggatacatttctggcaggtagtcactcttcttcttggcgggatctcctgtccggtaaagtaaggctttaaaggtgccataccggagttgatcagcagaaggctgttatcattatgcggtacaagtgaaaagctcttcatagccagatgacccttgctctcaaagaactcaaggaacatacggcgcagctcgttcactccgcggtactgtggttgtttcacttttttcttcctccattatataaatttgatttagggtttttcagtaaatatttcaggacagcaaaaatccgggcagaacagacttcgcctgtgaatgccctcctaaaacaaaccatgtatataaactcataatcggaattttaccatataagcgctgaattagcaagagaaaatgactccggaactatgtccagagtcattttttcattgtaacagatctctatttaattttcttctgccagtgcatcacaccgttttgccagctcataggccctctctctggtctgattgaccatgcttgaggcataacttaaactgtttccgctttttccggagctgtcagctgcgtctgactctctttttttcagccagtctctttcctcatttgcaaggctttgggcctcttcctggggaagggcttctaataatgcattgtatacagtgcttaattccccatcccacattttcaactgggtttctgcagaagttttagcggaataaacattggagtctgtttcctgttcctgcattttctggatctggctgtctaagtttctcaggcggtctgtatagctttcctgttccggttctgcatcatgtaaaaccggctccaaaccttcatccggaggatctgccgactggacctgcacctgatcttctgaggaattgctttcttctgtttcctctgccgtcctggcttctgtttctttctcagaacgtatctcggcacccgctgcctctgtctgttccggatcacctgctttcatttttgcctgtgcttcccgggggactgcctgcaaaggcgcagagtcactatccactgctgtttcagccgtggtctcagaaagaacctgtattttctgttcctgtgggactttttttacaacggaacttgtatagctagtaatggcgatccctactaccaggatacaaccgatgatgacccatatccttctgtctttcattctttcacatccctgataaagagtaatgttttccagtcatacagtaccacaaaatcaggtgcttgtgaatacaaattcgaaaggagtaatattttgtaagatttgcgtaaaaattggggctgtgttgaaacagccccatggatcataaggataagccctcatcttctattaaattatttccgtctgccgctgtagtagccagctggtcacaccgctcattctgtggatgtccggcatggccttttacccagatgaatgtgacctgatgctgctcttttgcctttaaaaggcgcttccacaggtcaatgtttttcaccggtccgcttttgccccggttccagcctttggcgatccagccgctgatccagtttttgttaaaggcatctgtaagatatttcgagtctgaatacagctcgatcttacaggggcgatttaaagcttccaagcctgctatggctgccattaactccatacggttattggtggtctttttgtaacctgcagataaggtcttttcatgtaactggccatttttatccacataatgcatgaccactccataacctcccggtccgtctggatttcctcttgctgatccatctgtgtagatctttacttctgtcatttttctctgtactcctgttgtttatcggttccatttttcgcaaagagctaatatctgctctgtaaaacgggtcagatcctgatttgccccgccctggttgcgtgcgatcacatccataagcatctgtcctgcatccaccagtctggtgtaaacgcctgttgcctttctggttgcctgagtttctgcctctaccggaacaggctcggtctccttgatccatacaccctttatcaggtcaaattccgaaccggaataaggtgcttttgctgtaaggccaagctgggtatttaaagcatccgtaagagactcacaggactcgtcatttccatgtactacaaatacatatttgggcttttgttcaaaggctgcagcccaggtaagaaggccgtctctgtctgcatggccgctgataccatccaaagtctcaatatgcgccttcacatcgatctcttcaccaaagatctttacagcaggggcaccatcctgaagcagacggcctaaggttccttctgcctggtatccggcaaataccacactgcattcttccctccacagattatgttttaagtggtggcggatacggccggcatcacacatacctgctgcggaaatgatcaccttcggggtcatatcaaagttgatattttttgactcttcactggtaacggaaagctttaatcccgggaaatcaattgggttgataccccgttctaccaacgcctttgtctcctcgtcatagcattccaccatattctgcttaaatacatgggtagcttctactgccaacgggctatccacatatacctggaagccatcgtgaccggtaaccagcttttcttccttaatatggcggatcatataaagaagttcctgggtcctgcctactgcaaaggccgggatcactacattgccctggcggtctaaggtctgctggatgatacgggccagacctactacatggtcttcgccctttttgtgatagcggtttccataggtggactccatcactacataatcgccgtcagaaatatactggggatcccggatcagcggtttattcttgtttccgatatcaccggaaaagacgatctttcgctgttcatccccttctgtcgcccagatctcaatagaggctgaaccaagaagatggcctacatccgtaaaacgcagggtgatgttttcgtttaatttaaacttctgtccataagccacaccttcaaaatggcccagaactccttctgcatcctgcatggtataaagggcttctacctctgttttgccggctctgcgtgctttacgattgcgccactctgcctccatctcctgaatgtgggcactgtcccgaagcataatgccacacaggtctgcagtcgcataggtggttatgatctgccccttaaatcctctggcatagatccagggaagcatgcctgcatggtcaatgtgggcgtgggtcagaaatacgtagtcaatgtcgctgtaactgaccggaagttccgcattctggtaaggattgttcccctgctccataccacagtcaataaggacttttgtatctcctacttccagaaaatgacagctgcctgtaacttcatggtctgctccgataaaggtcagtttcataagcattctcccctctgttgcccctttttattgttattataagggtctcgtttttgctgactctagtatagcacatttgcatgtttatttgcaaactttttcagttattttgcataaattagacaagttttctgataatgtcgcttactacgcatatgccaccgggtcccaagctcgaaaatcctcttgcaagcaagcttgcatcggatttttgagttttgtcccctggtgtgtcatatgataatacagatcatccccccattactgtcattaatgatcttctgcagtgtatcctgcaatttctgctggcactcatcggtcatctgggagatcttggcctggatgccgtcttctacgatctgttcaatggatttgccgaagatattggcattccagatgccttcttcactgtctttggaactggattttatgtatgcgatcaggtcctttgcctgctgctcgcttcccacaataggagcgatctcggtctcgatctgggcccggatcaggtttacagagggcgcctgggccttcattttcacgccgtacttatttccatgacgtatcacttccggttcatctaataatatctcatctttctgaggcatcatgaccccatatccctttaatctggcctgggccagggcctcttttactttatcatactctttctgcatacctgctaaagtgcttaaagtctgcatcagctggtactcaccttctataggcagtcctacatagtcgcttaatatctgataataatagctgtcatccatctgtacctgtaaggatacggtaccgtctgccatttccattttttcgatcgtgatcttttccacaggtcctgatgagccgccaaatgtctttatctgagaagctgcatctttcatgtggctgactttctttaaaagttcccttgccatatcgatcacctgggttttaagccagtgggtagccggaaggacttccagccatttgggaatatgaaaatccagttgcgtaacaggaaattcttttaaaacactttccagaatatggaaaatatcttcttttttcagctgctcgcagctgacgggaagaactgtcaccccataatcagctgccagctgttctgccagctttaaggtttcatctgaatagggttttgtagaatttaaaagaaggataaatggcttccccagctttttcaattcatctacagtctgtttttccgcatctatataggcagagcgctttaattccccaacagagccgtccgtagtcactacaatgccaatggtagaatgatcccctatgactttcctggtgccgatctgggccgcctgggtaaaggggatttctttttcagaccagggcgttttcaccatccgctcttccccattttccacatggcctgcagccccgtctaccatatagcctacacagtcgatgaggcgcactttcgcctggatcccgtctcccaaagtgatctgcaccgcctctttggggataaatttcggttccgttgtcatcaccgtttttccccctgcgctctggggaagttcatcggtacttactgcctttagactttcatcttccatagccggaagcacagccagctccataaaacgcttgataaaggtagactttcctgtacgcaccggtcccaccaaccgatgtagatctctccctttgttctggcctgaatatccttgtatacattaaaattgtccataaaaatacccccttgcacgtttatataacatatgcaagagggtatgatctttattcgcttaaataagccttctttacacggtcgttattcatcagttcttttgcatcgccggaaagggcaatggttcctgtttccagaacatatgccttgttagcaatagaaagtgctttctttgcgttctgctctactaaaaggaccgtagtgccgtctttgttgatctgctggataatatcaaagatctcatttacataaataggtgaaagtcccatagacggctcatctaataccattaccttcggatggctcataagagcacggcccatagcaagcatctgctgctcgccgccggataaggttcctgctaactgattctttctctcttccagacgtgggaaacgtttatagatcatctttaatgtttcttcgatctcatttttatccctacgggtataagcgcccatcatcaggttctgtaaaacagaaagggtcgcaaatacacggcgtccttccggaacatgggcaattcccatacttaccagcttatagcccggaatgtgggtaatgtcttttccctcgtaaatgatctttcctgcttttgcgtttaacaggccggtaatggtatgcaaagtggtggtctttcctgcaccattggcaccgatcagcgctacaatgtctccctggtctacatcaaaggagattccctttaaagcctggatcacaccatagtatacttccaggtcttttacttcaagcattgccatactatctctcctccttattcacccagatatgccttgataacttccggatcatgcagtacatcactggtagcgccttctcttaagacctgtccgaagtttaaaacggtcagcttctcgcagataccgcttaccagcttcatatcatgctcaataagaagtacagtcatgttaaaattgtcacgtacaaaacggatggtatccatcagttctgctgtctcgttagggttcatgcccgctgccggctcatctaacagaaggagctttggctctgttgccagggctcttgcgatctctaactttctctgcttaccataaggtaagttggaagccttaaaatcacattccttatccaggtcaaatacctttaacaggttcatggcctcttcgtccatctctttttcaatcttaaaatatctcggaagacggaaaataccttctactgtagaatatttatgatgattgtgaagtcctgcctttacattatcaagaacggacatatccttgaaaagacggatattctggaaggttcttgcaataccggcctgattaatctcaatggtactttttccggtaatatttacatcgtctaaaacgatacttcctgcatttggcttatatacacctgtaagaaggttgaaaatggtggtctttccggcaccgtttggtccgatcagtccatacagctgtcccttttcaatgttgatatggaaattatcaactgcctttaagccgccaaaggatatacttaaattctttacttccagtaatgccatattattttgcctcctttgccggtttcttatttccctttaatgctgcaaacattctctcacgaataactacaaactgaggtgcagagttaaacagcatcgctaagatcagcacgatggcgtacatcagcatacggtaattgctcagtcctcggagcatctctggaaggagatacaggataacggtagcgatcacagaaccgcggatgcttccgataccgccaagaactacataaaccaggatcataatggacatgttataaccaaagttctttggcagagcggtcagtgttgtcaggttgtgtgcatagagaacacctgccacgccagcaagacctgcggaaatactgaatgccatcagtttatattttgtgatgttgataccaatagactctgctgcaatacggttatcgcggatagccatgatagcgcggcctgtacgggaattgaccaggttcattacaataaataaagtgatcagtaccaggatcacaccaatggtaaaagttgctgcctgaggtgtaccggtaataccctgggcacccttgatcagcacttcgccgtctgcatccatatttaaggacatggagtcttttaaagaaatatggaagccggaaccatctcttcccagatatacagcattgatgatatttttaatgatctcaccaaacgccagagttacgatagccaggtagtcaccttttaatcggagtaccgggataccgatgagaataccgaaaacagctgctactaccgctccgatgattactgcaatgatcagagaaaccgtcggattcatagagcccttcatgcacttggagaacaacgctccggcgaaagcgcctacgcacataaaacctgcgtgtccaaggcttaactcacccaggatacctactgtcaggtttaaggaaactgccataataacatagatacagaaaggaactaaaagtcctttcatcaggctggacatatgtccggtgcccattaagatctgaacaacgatatatgccacaaccacaatggcatatgtgatcatattgttgataaatgtcttctgctttgctttacttttcatacccgcacctacactttctcactgatcttcttgccaagaataccggtgggttttactaacagtacaatgatcagtactgagaacacgatggcatctgaaagctgggaagaaatatacgccttggaaaggatctcgatcacacctaagagaacgcctccgataaaagcgcctgggatggatccgataccgccaaatactgctgccacgaatgccttgatacctggcatggaacctgtatatggggttaaggacggataagcggagcataacagcacacctgcaatggctgccagtgcagaaccgatagcgaaagttaaagcaatggttccgtttacattgatacccattaaggttgccgcacccttatcttctgaaacagctaacatagcctgtcctgctcttgtacggttaataaatgccatcaggcataccatgatcacgatacaggaaagaatggttgcaatggtctcgccggtaatatttaactggccgtctgccagctttaatgccgggatctttacaacagaagtaaatgattttgtatccgcgccaaagatcagcagtgctacgttctggagcaggtagctgacaccgatggctgtgatcagtacagcaagaggtgacgcactacgtaatggcttatatgccacccgctcaatgacaacacctaacaatgtgcatgctgctactgccagcaggacgcctaacacaggcggaagccccatggagctgactgtgacgaacacaacatagcttcctatcataataatatcaccgtgagcgaaattcagcatcttcgcaataccataaaccatggtatatcccagtgcgatgatcgcatatacactgcccaggctgacgccattgatcaaatagttgataaagctcatacatacacctcttcattaaatattgaaagtttaaattcccctataaaaccaagagggttgtcttaacgacaaccctcctttgggttattgatcagattttaaaccttctgaaattgattattccattgccttgtaagcgccgtctacaacctgaacagccttaggatccttctcaggctcgccgtcttcagtccagctcatgttggaaccggtcagaccgtctaccttgatctgggtcataacgccttccatagcgtcgcagatatcacttgcggacatatcaggagttacatttgcttcttccatagcagccttgatgatgtaaactgcatcataagcatctgcagcgaactggattggagtctcgccatatgcttcttcgtagctctttacaaagtttactgtcagatcatcggtagcatctgcagcaaatggagttaacagcatcagtccttctgccagctttacatcaaagttctcaacctgtaagataccatccataccatcgcatccgaagaactgtggagcatagcccatggtattagcctgctgtaagatcagagaagcctctgtatagtagattggtaagaataccagctctgcgccggactcttttgctttctgtaactgagtagagaaatccttgttgctgtctgcggtaaatgcttctgcgtcaacaacttcaaggccctggtttggagcttcctgagcaaacttctcatagataccgctagagtatacatcagagctgtcatagattacagcaaccttgcttgccagtttgtgctcaccaatgtacttagcagatgcagtaccctgagccgggtcagaatagcatacacggaatacgtttggatttgcggcacactctactgcggaaccggatggagtgatctggaacatattatcagctgcggtcttatcagcaactgcgatacatggagcggaggtagtagttcctaccagagcctgcatgccccagtcttttaaagtattgtaagcattaacagacttctctgcgtcatgctcatcatcctggaactggaattcgatctgtgcgccattgataccgccagcctcgttgatctccttaacagcaacttctgcaccatgctgtacagccagaccataaactgctgcaccaccggttacagggccgatgccaccgattttaaatacagcgccatctgctgctgcactgctttcgcctgctgctgcgctttctccctctgccttgctttcaccagcagctgctgctgtggtagatgcggagtcagagccgccgcatgcggttaaagatgctgccataactactgctaaaccagcgcttaagaatctttttttcataatagtttcctcctcacatgactgtatctgatatgtctttcatacagatacatttgttcttaaactttttacattataaaaactgactattgccttgtcaatacctttttataaaaaaatatgagaaggataggttgtttcataacctgtagttatgggagttattccttatcccagacaagacaggtattttccatcctcttatcccgcagcatcagctctgccagggcatcttttgcagacttgccatcaaataaaacttcattcacctgttctacgatgggcatggtcacatggtatttttctgccagctttaaagctgcctttgcagaataaacgccttccactaccatctttacttctttcattgcctcatccatggtatagcctttgccgatgaggatacctgccctgcgattacggctgtgcatgctggcacaggtaacgatcagatcgccgataccagtcagtcctgagaaggtctccggctttccgcccataaccgttcctaaacgggtgatctctgcaatacctctggtgatcagggctgcctttgtgttatccccacatcctaaaccatctgccgtgcctgccgccagggcaatgacattctttaatgctccgcccagctcaatgcctaacatatccggactcgtgtatacgcggaatacaggactcataaataaactctgcacatattctgctgctgccttgctgtgagcgcctgctacacaggtggtaggaagacctctgctcacttcttctgcatggctcggtccggaaaggacggttacctctgcttctggaagttcttcttcaatgacctctgaaagagtttttaaagttgcctcttcaattccctttgctacatttgtaacgatctgacctggttttaaccatggtttcatttttgctgctgtctgtctcacgtagacagatggcacggacaggaccaacagatctttgtccttcatagccgcctttaagtcaccggtgatctcaattgcttccggtattggcgtatctcctaaattgggatgctttctgtttactgataaactttccacttctgcgggaactgctgaccagagctgcactttatgaccatttccgtttaaaaggatcgccagtgatgttccccatgttcctgatccgattactccaactgatgccataaccccaccatcctttgccattttttatgatttttttgcgccgatcttattttcatttccatggatcagacggacgatatttgccctgtgccgccagaatgccatagcagcgatcactgctgtcactgcgctatattctatagaagaaatagcgcttaaactgtaagctccgcatcttcccatgtagatattccatgccagaaggatcacagaaaccaccagggaacctaaagaaacataacgtgttacagccacgatcagtacaaataccgccagacataaaacagtcagtctccagtcaattgagaaaatgataccggctgttgccgcaattccttttccgcctttaaaatgcagataaaaaggataattatgtcctaagataactcctaaaccaatataaagcatatacacatatgcatagtccggctggtctttaaaaacaaagcgcactgccatacaggggatcactgtttttaagaaatctcccaaaaatacagtaaggcctgctttctttcccattacacgcagcgcattggtactgccggaatttccgcttccgtatttgcggatgtcgatcccgtggacccttccataaatataaccagtctggaagataccaaacagataccccactgccaaacatacaagacgttccattttcataccccttatgtaattttatcacattttattttttgcgttttcacatgtttttacactttttagcatagatatttgtccgtgtaatacgcacatttgcttttgcaaccaaaacgcaattcagggactgctacgccagctgtttttaaaagctgtgtgcagcaggccctgctgatctacattgtctatttattaactatttatccttatctttccgctcgcggataatgaattttaaagatgtacctctgaaaccaaaggcattgcggatctggttctctatatatctggtataagagaaatgcatcagttccttgtcgtttacaaagactacaaatgtaggcggctttacagcgacctgggtcacatagtagatctttaagcgcttacccttgtcagacggtggctgctgcatggcaactgcctcggatacgatctcatttaacacaccggtagctacacgcatattctggttctggcgcactgcatcgatcagttcaaacagttttggaagtctctggcctgtttctgctgagataaagatatactctgcatatggcataaaagagagagtttcttttaacttattggtatactgataaatggtcttgtcattcttttcaatggcatcccacttgtttacagcaacaatgataccttttccacgttcatgggcaatacctgcgatctttgcatcctgctctgtgatgccctcttttgcatcaattacaataatgactacatccgcacggtctactgctgttacagtacggatgatactgtagcgctccaggtcttctttgatcttattcttacggcgcagtcctgctgtatcaataaatacatagggaacaccattgtggatgatctctgtatctactgcatctctggtggttcctgcaatattggaaacgatcacacggttctcacctaacagcttattgataagagaagatttacccacatttggttttcctactactgcgatccttggacggtcatcttcctcttcttccatctgggaagcatcgaaatgttttactacctcatctaacagatcgccgatacctaaacgggaagcaccggatacggggatcggatcaccgatacctaaattatagaattcatatacatcattgccgaattttgcaaggctgtctaccttgtttacagccaggatcactggcttgtgggacttgcgcagcatatctgctaccttcgagtcagcgtctaccagaccctgacgtacatctacgataaatacgatcacgtctgcagtagcaatcgcgatctccgcctgctctctcatctgtgaaagaatgatatcgctgctgtcaggctcaataccacctgtatcgatcagtgtaaagttcatgttcagccaggtacagtctgcataaattctgtctctggtaacacctggtgtatcttttacaatggaaatagtatcccctgcaattacattgaacagggtggattttccaacgtttggccttcctacaatggccactaccggtttactcaattgttttcctccttactttgtcaagcgccatgctttgcctgcgctttatcaccactatatctgtttgcgcacgatcttatactcgtcatctgactggtaataagggcaggctctcacatctccttttaagaagcgcaccatatcgtcctcatctaaatctacttcgcagacatagtattcattttcttcatcatatacatagtttccgcagcattcacagctgccgacgaccttattatctttcactttctgtttcatcgtcctctatatactcatcctcatcttcccatatctcatctaactcatagccttcataaccatattcttctccaggaagcccttcttcctttggttcaggctccggctctgaagatggatcaaggatagcgtggacaaaatcttgcccgtctgattttactatacgtatcttaacttgtaaagccttttctacatcttctgctgttaagtcatctaagaatacagtttcaccgatacggaacatattaataggaagaaggagatattctcccagatttttatccttcagctgggcgatcaggtcttttgcagtgatcagacctgaaaccgtaatacgctccccaaaaaaatcattccggatgggataaatgttgatggtcctgtttgggaattttttccggatccatccagcatatttttccatataaggataaggaagacggccggttgcaagggatacaaagcccggctcatcatttccttctactttgtccagcgcgtccgctacttctgtagccataagacgcagcattcccacgccattttccagctggatatagccgtcatagcgttctttctccggcagtttcctttctgccagtgtataaaactcatcgctggcatggataaaatggatcccgtgttctgcgtagatcttcttctgccaccgttcgatcatatcaatagtagcgcaggcgtcttcttttgtgaaaggctctaatggatataagccgtctctgtatttggaaagtcctacaggaactacggaaacgctctgcataacaggggcatatttggacaggtcactgatggaacgttccagctctgccccgtcatttactcccttgcagagaacgatctggccgttcataggagtttccgcttcatataagcggtcaatgatctttaaggcccgtcccgcaaaccggttgtgcagcatcatacaccgcagttccggattggtcgtctgtacggaaatgttgatgggcgccagtttgaagcggatgatacgctctacatctttatcttttaagttggtcagtgtaacataatttccctgaaggaacgataaacgggtatcatcatctttgaaataaagggtctctctcattcccggcggcatctggtcgataaagcagaaaatacatttgttgctgcaggaacggtaatcgctcatcagaccattttcaaaagtcagtcccagatcttcataatcattttctatatccagttcccattcttccccgttggcctttcgcaccaccatagtcatagacgggctgtttacataatattcgtagtcaaaaatgtcttcaacgggatttccgttgatggtaaggaccctgtctcccggctccagctccagttcctctccaatggaacccggatctacttttgagatcggatgtccttccagttttttattcatattcatataacctctgtgtatttcgttagttcacttaggttcacgcactgacgcgctccactgcctgctgtcgcaggcagaaccttcgttaatggctcgtgaaaaataaatgccacctttcggcgtcgcttatttttcccttcgctcattacatcataacaattttagaaagttttgtaaaccagatttacagcacgaaaatgccgcaaagcagatttaccctctgttttgcggcatgatgattgctagtatatacactcacgacccccgcgctatcgcgctccactgcctgctgtcgcagatgggtcgttagatctccccattgtggcgtctctgtaccagcttctggatcttgtctgttggagacagggatgcgctgatggaacggtcgtggtttaaggagttgatgattgctgcagtgtacttgctcatatcagcttccagataccacttgcggtcgaaaagttcttttggacggtaatttaagttggtggtaattacatagtccagatatcccttttcataatattcgtcaaacttctcaagaccattggtgaacagaccaaaggtgcagcatacgatcgcctttgctgcctttctctcctttaattccttacaggtgtctaacatgctctcaccggaggagatcatatcgtcgatgataagaacggtctttccttctacagaagaaccaaggaattcatgtgcaacgatcgggttacgtccgtttactaccttggagtagtcacggcgtttatagaacatacccatatcaactcccaggttgtttgccaggtatacagcacggttcatagcgccttcatccgggctgatgatcatcagatgatctttgtcgatctgagtggtcttatcatgagtaaacagtgtctttacaaactgataagttggcatgaagttgtcaaatccgtacagcgggatggcattctgtactcttgggtcatgagcatcaaaagtaataatgttttcaacgcccatctggatcaactcttctaatgccatagcacagtctaaggattcacgtttgcttctcttatgctgacggctttcatacaagaaaggcataactacatttacgcggtgcgcagttgccacgcaggaaccgatcacacgcttcatatcctggaaatggtcatctggtgacatgtgattggtgtagccgcaaacagtgtaaggaatgctgtagttcattacatctgccattacaaaaatgtctgtacctctgacagactcattgatcactgcctttgcctcaccggtaccaaatctcgggcactcaaaatccaacagataagagtccacatcataaccgcgataatgcagatctgccttgcggcgctttaattcctccatatcgttgcggcggaactgaacgatgtgagaatctaccttagatgcaaagtccttgcagctttccagtgcagctaactttaaaggtgctactggaagagagtcattgaatacaaaattattagccatgaaagcatactcctttgtcctataatggtcctaatagtcctaataatagtcctttatcctattgttttataccattttccacgataagggtcaagtattccaggacatttccttaaaaaatacatcacctaaggcacagaaaagcacccatattgcctctttcatttccaactttacggtgggaaaagagatattcatggttgcacatggtgcagatattggtagtgtggatattttccggctttaccccggcttccataaaaatgatctcattggcccgccacagatctaattggtatttgtccggacgttttccaggggcaatgatctcattgtgccactccggcttaaaactttccataaatgcctctgccacttcttctcctacttcaaaacagtcctggcagatgcttggcccgatgcaggtgatcagatccttagggctggttccaaaggcttttttcatggcatctatggtacattgtcccattctgtttacagtgccccgccaaccggaatgggaaaggccgatggctttatgtttcggatccacaaaatacaaaggcacacagtctgcataaaaggttgccagtgtaagatcaggcacattggtgatcagtccgtccacatctgtgtaatcccgttctctcactacaccttttccagcgtcttcttctgtcacaaggcgcacattggtggtatgggtctgctgggatgccaccatacggtccctgtcaactcccaatgcctttgccatacgggtgtagttttccagcacatcagccggatcatctcctttattccaggcaaagttcatagtagcatattttcccttgcttgcccctcctaaacgggtggaaaatccatttaccacaaggcctgtctcttccaaggcagcaaaagaaagatagggaaccccattttcttccctttgtataaatatattcttctcatttttatagttccatgggatcatctgtctgcctcttttctatataaatcaatataaagatcctttacaaggatactttgtttaaaaagcatttcgtatcagctgtatattacttccggttattcccaccacgtcaaaacggcagggcgtattttccggatagccgtagcggcacagataaaacagggctgtgcgccgtattttctcctgcttgcgaaaatctactgcctcaaaaggtgaaccgcaggatgcatcggacctgtattttacctctgtaaataccagttcttttccttccctgcacaccagatcgatctccccctgtctgcagcggaagtttttccctaaaatgcgaaatccctgtttttgcaaaaaagcagccgctgattcttcgtaacggctgccaatttttcttttattcatcaaatcttttatattttcccctatacttcaacaaaatggccgataaagcttcttctgtggataggacatgggccaagtgtctttaatgcctcgatatgtgcttttgtgccatatcctttgtgttttccaaagccatagcctggatagatctcatcatattccatcatcatatggtccctggtaactttggctaaaatgctggctgctgcaatagatacactttttgcgtcgccttttacaatagggatctgaggaatttcaatcccgggaatggtcacagcgtcatttaacaaaagtcccggctgtacgccaagtcctttgattgcctcacgcatagcctcataggtagcctgcaggatattgatttcatcgatgcgctgcggtgtggcaattcctacgctccaggcaagagccttttccttgatctccaagaacaactcttccctgcgcttttcagaaagctttttagagtcattcagatataagatctgacagtcctttggaaggataacagcccctgccgctaccggacctgctaaaggtcctcttccggcttcgtcaataccacagatcaactcatactgggcattttctttttcataggctttcatttcttccagccttaaaagctctttttccagtttttccccttttaactctctggccatttatttcaccttgatcctgtctttgtaatcctctgccttttccaggctgatacgacctaatttgcctgcgcggaaatcatctaaaagcaatgcagaagctctcgcaagatctaattccccgcctttcatcaggcaggcacggcttcttgcgatctcttctaatactttcacacggtcctcttccacattttcaatgccaaagcggtcttttaccacctgtggataatctttttccaaaaggctgatcagttcacaagccagttcgtccttatttaagatctgatcattaatagaaccaatgagagccaggtgcagacctacctgctggtcctcaaaacgtggccataagataccaggggtatctaacagctccaaagtcttatttaaacggatccactggttacccttggtaacaccaggcttatttcctgtttttgcgcaggcttttcctgcaaaggaattgataaaagtagactttcctacgttagggatacctactaccatggtacggatcgggcggtttaaaatacctctgcgtctgtctctttcgatcttttccttacatgcttcctgctgggcagcctgtacctgctttaaggttcccttgttacgggcatcgatctttactacatggattcccatgtcttcaaacatctgagcccacttacgggtctctgcctcatctgccaaatctgccttatttaacaggaccattcttgcctttcctgctgcaagtttatcaatatccgggttacggctggaaaaagggactctggcatccaccagctcgatcactaagtcgatgagcttgatatcttcctgcattgcccttcttgccttggtcatatgacctggataccactgtatattcatactatttaactcctttacgatacaaagcccagcttcagcagcggaagcatgcgaaaccacactttgcccagtatctgttctctttttacatttccaatatttggaaaacggctgtcctcactgctgctgcggttgtctcctaaaagaaaatattccttttctcccaaacgcaccggttctgccgctcttcctgccagggatacttcccccattttatcgtcttttaaagcttccccgttaatatatacaagaccatctttgatctgcaccgtctctcccggaagaccgataatacgttttacatttttctttccgtcttccctcttaaataccaccacatcaaagcgtcccggatctcttgttacataggtgatacggttcataaggaccacatcccgggcacttaactggggctgcatggaattgccggatataaggatctgctctccaaatccataaactaaaaaccagccgcaggcgatggctaccacaatattcactacccagcctacagcttttcgcagccaggctgtatcatcattaatatagaaatccactgttacccccgaaaaataaacctgtctgcaacctgtcttatatgatgtactctcggagtctttcatgcacttgcctttgcggccgattttccgccagtcgcacccgaattttatcaacgtacgcaccgcgtacgcctcaaaaatttgggcacaactgacaaaaaatcttctcgcaaaatcaagtacaaaaagattccgagagtacattacgagctaaaaaggggcaattttcattgcccctttttgatcattcttacttcaattatttaactaactcttttaccttagcagccttacctactctgtctcttaagtagttcagttttgctcttcttactttacccttacgaacaacttctacgttgtcaacgcttggggaatgtaatggccaggtcttctcaacgccgataccgttagagttctttcttactgtgaaagtctctctggctccgccgttctgtctcttgataacagttccttcaaagatctggattctttcgcggttaccctctttgatcttgttgtatacctttacagtatcaccaacattaaagctaggtacgttctcttttaactgtgctgcttcgatattcttaataatttcgttcatggtgtgaacctccttcatctattggatgttcttaatactctgtatcataaaatcccgttcataatacttcagtagcagaggaccatctattcttgtcacaacgaactaatattatcatagtttcctgctaaatgcaagcacttttctacgtttttttactgtttttcgctgttttttccttcttctttcccggattttccatctgtctttaaaatctggatacagaccttcttaatacggtttccattgaccctgtgggcggacagacggatatttcctactgtcactacttctccctggaccgggatatggtctaatttttctatcataagaccgccaatggagtcgtaatcctcagaatacagggaaagtcccagtctgtcatttacatcatccaggctcatggcaccgtctaccagataaaccccatggcctaattttacaaaatccttttcctcgtcagcatcatattcatcacggatatcgcctacgatctcttccaggatgtcttctaatgtgatcaggcctgctgtggttccgtattcatctaaaactactgcaatattattggaagttttccgcatttccagcatcagctctgaaacttttttagcttcaaaggtatacagcggctttcttaaatgatctttaatagaaaagttttctgcctcatcttcaagcaaaagatctttaatatttacaatacctaccacattatccttgctgtcctggtagaccggaaaacgtgtataccgggtcttacggaatttctccatcagttcttcgtaattggcatctatatcaataaaagtcatgtttacacggggaaccataatatcccctgcaacagaatcatccagatcaaacacattattgatcatattcttttcatctgtctcgataactcccttttcatgacccactgccacaatggtacgaagctcgtcttctgtcatgacatccgtctttttattgggatccacatggagcagacgaaggatgcagcctgacatcttattgaccgcccagatcacaggtgtaaggatcgtcattaaaagataaatgtttcctgcacttttcattgcgatcttgtcagcctctaaggaagccatggtctttggtgtaatctcaccaaagatcaggatcaggatcgtaagcacaccggtagcaataccaacagctgcatttccgaaaatatcagctgccagaatggtcataatagaggaagtggacaggtttaccacattatttccaatgaggatggcacttaacatcttgcttttattttcatgaagttttaaaacacaggccgccgccttgtttccgtcgtcagcaagggtacgcatacggatcttatttaccatggtaagtgctgtttccgcagaggaaaaatacgcagataacgccagtaaaataacaataataatgatacgcaggacaatcgtattgcctgatgggtccatttctcacaatctccttaaatcttaatataacttatatttcctgttttaacgctccaagaaccttataatagcctttcagttcctgtaaggtagcctttttttcattgagaagtttttttactttcttcatctgctggtaatattcccggtcgcttccaggagtttcatcgctttttactgcttctcttaccagctgttctaactcttttaaccggctctctccctgctcttttaaaagactgtctaaaaacttctgctcctttaatgtaagggatgcatcttctaacagatccggccgtctttccagagtcctgcggatggactgctccctgcgccagctctcaatatttttgtggtgtccggaaagaaggacttctggaactgttttcccctcataaacctctggtctggtatactggggatattccagcaaatta

SEQ ID NO: 3560 - DNA, 28997 bp, Unknown
  gut microbiota DNA sequence
cgggaaatacagtcgatcatcaccatagaaggaagctcgcctcctgtaaggacaaaatcacctgctgacagatattctgcctggatcagctccagggctctctcatcaataccttcataatgtccgcataaaaacaccagatcttcttcttttgccagatcctgggcaatagactggttaaacacacgaccctggggagtcatatagatcactcttggacgttttcccagttttttacaaagagcctcgtatgcatcacacacaggtgccggctggatcaccattccggcgccgcccccataaggggcatcatctacatgtctgtgcttgtcagttgtataatcccggatatccactgcctctacggaaatggcgccgctttcaatagctcggccggtgatactggtctttaaaccattttccaccatatcagggaataatgttaatatatggaaattcataaattctccttccaacggttcttaagcctggtctgaaggcggtataaggtattcatggcatcaatcggtgtcatggtagacagttccagtccgtccagctccttgatgatatcatcatcttttacagtatcaaagaaagacatctgctgcatatctacctcatccggctttggaactgccttgtgctgtaccacattggcgctgactgcggcgatctcctttgcctttgctgtaatatcattttccgtcagctcactggcgatctcttttgctctggaaataacagagtccggaacacctgccaactttgctacctggataccatagctcttgtcagcgccgccacggacgatcttgcgcaggaatacgatatcatctccctgttcttttacagcgatgcaataattctttactccggcaatggttccctctaactctgtcagttcatggtaatgggtggcaaataaggtttttgcgcctaacagctttgtattgctgatatgttctactacggcccatgcaatagaaagaccgtcaaaggtactggttccacggccgatctcatctaagactaacaggctgtttctggtggcatttcgcaggatattggcaacctcggtcatctccaccataaaggtactctggccgcttgcaaggtcatcagaagcgcctactctggtaaagatacggtcgcagataccgatatttgcctcctgggccggtacaaagcttcccagctgggccatcagcacgatgagggccgtctgtctcatataggtagacttacctgccatgttagggccggtgataatagaaaggcggttctttccattatccaggaaagtatcatttgccacaaacaggtcatcccgcatcatctgctctaccaccggatgacggccgtttttgatctggatgacgcctttttcattaatagaaggttttacatagttccgtctggttgcaacggaagataaggagcagaatacatcaatacctgcaatggcttttgcagtcttctggatccgcactacctgggctgcaatggagtcacggacctgacagaacagatcgtattccaaagataccagcttttcctcagctcccatgatcacgtcttctaactgctttaactcatctgttgtaaaacgctctgcattggtcagggtctgttttcttacaaaataatcaggaaccatatctttaaaggagttggtgacttcaaagtaatagccaaataccttgttgaatttgacctttaaattcttaatgccggtcttttctttttccctgttttccagttcaccaagccaggtcttgccctctgtctttgcatggcgcaggcggtctgcctcttcatcatagccttctcggatcatgccgccctcacggatggtaataggcggatcgtctacaatggcttttccgatcagctcataaatatcctctaatgggtctaattctgactctaattcctttaaaagatctgactgaaactctcctaacagctttttgatataaggaagcatttccagggaagtcttaaatgccagaagatcccttggattggctgttttatagctgatacggccgatgaggcgctccagatcgtacaccggatttaagtattcgcagatttcttctctggaaatataattcatattcagttcttccactgcatcctgacggcgcaggatctcattcttgtggatcagaggctgctcaatataattgcgcagaagtctggctcccatagctgtcttggtcttatccagcacccacaaaagagttcctctcttctgcttttcacgcatagtctccaccaattccaggtttcttctggtagaagtgtcaatgaccatgtactggccggtagaatatggggttatggttgtaatgtgctccagggtactcttctgggtctcatacatatactccatcacagcacctgctgcgatcacaccggtaggataatcatccagtcccagtccgcttaaggaacctactttaaaatgttcttttaatacctttttgcaggactcatctgaaaagaaatgactgtccagagcagagatcgccacctgataccggttctttaactcgtcaagatctacaccggatacataaaaggcattgttgcagatgatctcagagggagaaaatttattgatctcgtcaaataattcccggtctgactccacctctgttaccaggaactcaccggtactgatatccgctgtggaaataccataacggctgtccagatatacaatgcccatcaggtagttattttttgtctcgtccaaagcctgggcactggtaatggttcccggtgttaccacacggatcacctctcgttttaccagtccttttgccagcttgggatcttccatctgctctgcaatagcaactttatagcccttttgtaccaggcggtaaagataggagtctaccgcgtgaaaaggtacgccgcacataggcgcacgttcttttaaaccacattccttacctgtcagtgtgatctccagttctttggatgctttcagtgcgtcatcaaagaacatttcgtaaaaatcccccaggcggtaaaataagatacagtccgggtactctttttttgtctccatataatgctgcatcatgggagacagctgtgaataatcgatttccaatggtgttcctctcttctatgtgtatctgtccatctgttacagttcatacaaaccaacccatggccaaactgtaacctttctatctgtccgtttgtctgtcataattgtaaaaatacaggtatgggcgggtcatcagattactggttcagccgtcccatataataaaagcccttgctttcctctaagtatacatctaccagctttccaatgagagatgcatctccagggaaatgtacaatggtattatttgacattcttccagttacaagttccggtgaatggtcgtttacttcctctaccaggacagtctgaacggtgtgtacatctcttccacagacttcagcagaaatatcctgaacttcctttaacaggcggtcaaaacggttctttaccacatcttccggtacctggttttccatagcagctgccggtgtaccggtacgtttggaataaataaaggtaaaggcgctgtcaaagcgtacttttcttactacgtctaaggtctcctgaaagtcttcctctgtttctcccgggaaacctacaataatatccgttgtcaatgaaatgtccggaatagctgttttgatcttctcagccagtgccagatactgttcctttgtataacggcggttcatggcctttaaaatacggctgctgccagactgtaaaggcagatggagatggcggcagatcttctttgattttgccatcacttcgatcagttcatcagaaagatcctttggatgagaggtcatgaaacggatgcgctccagtccctcgatcttttctacttcttccagaagttcagcaaagtttaaaggctcatccagtccttttccgtaggagtttacattctgacctaacagcataacttctactacgccgtcttccaccagatttttgatctcaccaatgatctcacctggtctgcggcttctttcacggccacgtacatatggtacgatgcagtagctgcagaaattattgcagccaaacatgatattgacaccggatttaaaggaatactttcgctctaccggcaggtcttctacgatctgatctgtatctttccatacatccactaccattttgtgctttggcttcttgtcttcccggccctgggcttccagttcctctaaacgctcttccagacagatacttactaattctgccagcttgaaaatgttatgggttccgaaaataagatcaacaaaacggtaggtctttttgatcttttctactacttccttttcctgcatcatgcagccacagagagcgatcatcatgtgtggatgttttttctttctggcacctaactggcccagtcttccgtaaacacgcagatttgcattttcacggactgtacaggtattataaagaacaaagtctgcatcctctgtttctactgcctggtagccaatggtctctaagatacctaacagtttttcagagtctcttgcattcatctggcagccaaaggtattaatacagcaggtaagaggtctgcccaggttttcttctaaaatgtgtaactgttcctttgcgtgagccataaaatactgctgacgctgtggttcctgttccggtatctccgtcataaatggggtcttattttccatgtagatctcctttaaattcatctttcaattatctaaaaatcttctttatctaaaacacacaagcaggccgggcagaatatcacccagccagttgtatctttgctttctgtaattagtttacttttcctatcctgttaaatggataataacagaacagcacttttgccacgatcttgttcttagcaacgaatttattatcccagaaacgggcatccagggaattattccgattgtcgcccatcatgaaataacagccctccggcacttcataaggtccgtaggaaccttccattggctccggcagataaggctcatcaagaggtgtatcagaaccattgatatagacctttccatccttcacctcaacggtctctcccggaagtccaatgactctctttacataatatactttttcattgtccgggtaacggaagatcacaatatctcctctttccggatcatcttttatataagacaatctggagccgatcacacggctgtgggacataatggtattttccatggatccggttgggatgcggctgttggcaatgacaaaattatttaaaacaaaagcaatgactaccgcagccacaatgatctgaagccagcttaagatctcttttcccagactggtctcctcctgcggctcttcctcggaatttctccgattgcggcctttcttttcttcttctgacatgttggtggtttcctcttctttcttttctatacctaacggatctggccatcaccatagatgatatacttggtggtagtcagttcttttaagcccatagggcctctggcgtgaagcttctgggtactgataccgatctctgccccgaagccgaattcttctccgtctgtaaaacgggtggatgcatttacatacactgctgcagcatctacttcgtctaagaacttctgggcattaaaataatccgatgtgataatagactcagaatgtccggtattgtatttattgatatgttcaatggcctcttctacagagtctacaatctttaaagataagatatagtccagatattctgtaccccagtcttcttctgttgcaggagtaaattccggtacaaccgctctggctgcctcgtctgctcttacttctacctctttttctgccagacgctttttaagaagtggaaggaactggtccgcaatctttctgtggacgatcagggactcgcaggcattgcatacaccaatgcgctgtgtttttgcgttatagataatatctaatgccatattaaaatcagccgtctcatctacaaaaatatggcagtttccagtacctgtctcgatcacaggaacggtgctgttttccactaccgaacggatcagtcctgcgccgcctcttgggatcagcacatccacatagcggtttaaacgcatcagttcttttgtagtctctctgctggtatcttcaatcagctgcagggcatcctctggaagtccggctctggtaagaccagtgcgcagccattttgcgatcgctttattagactcaatggcatcgctgccgccttttaagatcactgcatttccagatttaaagcagaggccgaaagcgtccgctgttacattaggacgggcctcatagatcatggcaatgacacctaaaggcaccctcttctggccgatctttaacccatttggacgcagtttcatggagatcacttctcctaccggatcatctaaggcagctacttttaaaaggccgtctgccatagactggatccgtcccggatttaaagccagacggtctaacatgcctttgctcatgccggaactttctgctttttcataatctgcctggttcgctgccaggatctcatcttctccctctaacagggctctggctgcttcttccagtcctatatttttctctcttgaacctaagttatttaatgttctggaaacagcttttgcgcggcttccgatctcttccagtgtcataaccatctctccttctggctataaatatactctcggatttttttatactgcttatgcttccttgatgccaccatattttttgcccaggtctgtaatagaaccatctttctctttaatagagatattatttaaactgcttcttaaattcgcacggatggcagccagatattccttttttaaagctgcctgctcggttttttcctcctctgtaaggcctacagactgggatttatgataaagttcgttaattctgtcgatcttgcttgagtccataattttactccttaatgatattgctgtagttctgccacagcattttaatactcgttattcagataatgcatcagatcaaagtccagattaggatgagctaaaaataaagttcccttttcttttccactcataatgtccatgatcacatctacctggtcaccattggcgatcaccatatcagctccgctgtctgtggcaatgcgggctgctgccagttttgctgacattccgccggttcccacactgcttccggaagtctcttttcccatatttaagtacttctggctgatctccggcaccagactgataaatttagcgtccggattgcttcttggatcatcggtataaaggccgtcaatatcagaaagcaggatcagaaggtctgctccgatgagagctgcaacaatagcagaaaggcggtcgttatcaccgaaactgtccacataagggatctcagaggtagataccgtatcattttcatttacaacagggattgcacctaaacgcagcagttcatcaaaggtgttctgtgcgttatagcgggaactgtcattgaccatagtatcctttgtcaaaaggacctgggccgctgtctggttatactcactgcaaagcttctggtagaccatcatcagtctggcctgtcctactgctgcaaaagcctgtttttccgctaaactgtccggtcttttatgatgtccaaaagcctgtctgcctgctgcaatagcaccggaagaaacaaggactacctctttgccttcgcccctcaggtcgctgagcacacggatcagcttctcaatctttgttaaattcagttctcccgtttccggatgggtcagggaagaggaaccgatttttattacaattctttttttatcttttaaactgttacgttttgtagcttccataggtatcttctgtcagctcccttctgcataggtttcgtcctgcctatcttcttggcttcatgttccatgaaaccaagaagcatgctttgtcaagcatatgctgatttctgcaataagctgtttctgcaagcaagcttgcaacacatcttatcacataaatcagcgcaggactggacttttccactatcttacaccaattttattactccgtcaatttgtatcttctgatcagttcttccgctaccttaagaccatccatagctgcggaagtaataccgcctgcatatccggcgccttccccgcagggatataaacccctgacagaactttctaatgtctctcctcttggaatacgcacaggagaggaggtacggctttccacacctgctaaaattgcatccgggcggtcaaatcctttgatctttttgccaaaactttccattccctctatgaatgcttcagaaagttcgtttgtgaggatttttctcaggtctgcaaattgatattctccgcagaaagccgggtgaactttgccaaatttttctgagatttttccgtctttaaaatctccatacagctgaaccggtatttttccatttcctgcctcatatgccttttcctcaagctctctctggaaatgaatacctgccagaggatgtacctcttcccggcctttaatatcgtgagaaaaatcctcaggatttactgtgacaatcagagcactgttggcattctcccctgctctgtcatgatagctcattccatttactgccagacgtttctcctcagaagaagcattaactacatagccgccggggcacatacagaaagaatacacacctcttccataagaagtctgtgctgtcagcttatagcttgcaggtcctaattctttgcattctgccattccatactggctttcattgatcatggtctgtggatgctggatacggaaacctacagcaaatggctttgcttccatagatacctgttttccataaagagtttcaaaggtatctctggcgctgtggccgatcgctgcaactgctgcctgtaccgggatccgttctgtattatttacagtaaccgccgtcagtttcccttctgttatctcaaaatctgttacctggcttaagaaacggacctgtcctcccaggctttcgatctcttttcggatagattttacaatatggcttaacacatccgttccaatatgaggtttattggcatagcagatggacgggtctgctccaaactctgtcaggatacgtaaaacttccctgttccttccaaaagtatcttttacaagggtgttcagctttccgtcggagaaagtacctgcaccaccttctccaaactgtacgttagatgaagggttcaactctcccgttttccagaattttgccacccgctctgttctggtatctacatcttctccccgttctaaaaggatgggacggtatccctttcttgcaagggcaaggccacaaaacagtcctgcaggtcccattccaatgatcacaggaggatattttaaaggctcatttccacattcaggaagagaatagggcttttcctcatgaactgtaatatttctgtcctttttcttttttacaatgcgctcctcttcttttctgccaccgctttttaaagcaatatctacaatataactataatggatctccggcttttttcttgcgtccacagactgtttgatcagttctacttcttttatcatctcaggctggatacgaagttcttttgccgcctttaaaagcaggtcctttctggtatgtcccagaggcatttttaactgactgatacgtatcatgttcttgcagtcctcctggttttctgtgtatatttcttctctgcgtactttttaacaggtttcttttccatcggtttcttatttatgtttctctttttttctatatttttcttttctatgcttttcttctctatactcttcttctcggcatttcccgctgcacatcttcctgcgatcatgccgctggaccaggcaaactgaagattgtagccaccgcagataccatccacatccaggatctcccctgccagataaagccccggacagatctttgactccatagtagttccatccacctcattagcatctacaccgccgcagcacacctgggcattggcaaaaggattaacagacatgacaactgcttcatattcttttaattctttgcggatcttttccaactgttttccagttaaagagccacaggacgtatttggatcaatgcctgccagtttcaaaagagcctgggcaagtttgcggtttaacattcctgtaaatagttcttctgccggtttgtaagccagcaaaagggctcttttctttaaaagccggaaactttcattatcatcccagcccggcataaagtccacataaactcttacctttttcttttcatctaacgcccttgcggcataacggcttacctggaagataggaataccggaaagaccgtaatctgtgatctgcagctctcctctgtcacttgccagggtaataccgtctgcctgcaatctcacttctgcttccgtgcggatccctgccatctgtttgtataaatttccctgacagcgaagctggaccagagccggaagtggcttgatcacagaatgtcctaactgtctggcatattcgtaaccactgccatctgagcctgtagaaggcgctgctttggaaccagccgcaaggatcagggcatctgtttctacctttccctgatctgtatgtacaagaaagccaccgtttttctttttttcgatcttttcgatctgacaggaaaggaggatacggacttttagtctctctaattctgtccttagcacatctaaaacagaagcagcctggtcggaattaggataaacataaccgtttctgtcttttggaacgatccccagtcccataaagagatccagcgtctcttttacatcaaagccccttattacctgcataggaaaatccttcctgccgcagcggtagcagtcttcttccattttgtaattggtaagattacacctgccgttgcctgtagaaaggatcttttttcccacgcggtccatatgttctataacagtcacttccgccccgtttcgggctgctcctatagcagccaccagcccggacgcgccaccgccaataattcctactcttttcttcatattttttaactcctgttttaacttgtatacgactccagataatggtatacgtccatcatatctgaaaaccagatgccttccatcagtcgggctctttcactttccggaaaatcagttaccggaatatgggtgtacagacagacggtgcttttatcactgcaaaatacaagaaggaaaccggactcactgacgagaaaataccgggaacttaccggagtaatgctctcctggttggcagctgcccttccttccatttcattcacactttctgtttcgatcactgtattaggtaccggcgcttcttccctcatctggtaacgtgccgccccgtagatcacaagaaccgatactacagctgatatactgaacagtcccagggcaaataaaaaatgtttcatggatactacctcctgtatcaagtcatatacgttcatttactgaccttttcagaaatagtatctgccataatagaccattttaaacatgtcctggcactgtttgcaataccatttacagtaatcttactttctttaaaatgcggatcatttttgttcccataggcatatcccgcagttcttcttcatcaattgccttaagtcccactaaaagtactgcataaacagcagctgctactgccactgccgggaataccacgattgctctgccggaacgtcctcttagaagcgctgccggaaggataaaggtaagaaccttgtatacaccccaggctgccccgcccataacgcaggcgctgatcgccggaagtacaaatgttttcttatactcctgacgatatcttgcatgctttgcaatagtacgggcatttaaaacgcacattacaaaggcgaatacaatgtttgcaaatacaacaccataaatacccatatggaataccataagaagtacccaaagcactgccacatggatcaccagagaaacagctgcatggcgtaccggcacttccatacggtttaatccctgaagcactgcattggtcactgtggacagagagaagaatacaaccgcaagagaacctgccatagtcagcttaattaaaagactgttatcttcgctgataaacagcagattgcacacaggatctgctaaaaccgcaatacctactgctgccgggatagagatcagcatagagaaacgtactgctgctgcgatcctttttaaagtctgttccctgtctcctgcagataccgctcttgtaagagacgggatcagagaggaggaaagggcattagaaacagctaccggaatattaaataacagctgatactgtcctaaagctccccagaatacagcgatctcttccccgctgtatcctaacttgtccattccctgtccaaagaggaagttgtccactacattggaacaattataaataccgctgctgactacaatagggagtactgtgatcgtcagggcatagatcagttttctatatcgtgtccgctttcttcttgcatatttcgctgcttcttctgataactcctctgtcgcaatacgctgttttaaaacagaacgaccgctttttgctgtcaggaagataaagaagataaatgcagtaagagcgcctgcacctgtaccaatggttccgcctgcagcacctaacgcataagaataattctttgctccctgggccgcattcatcccttctcctacgtggaataaaagtcccgctgcaactacgctgacaatggcattaacgatctgctctaagatctgtgaaaccgcagtagggatcatggttcctgttccctggaaataacctcttaaaactcccagatacgccatgatccagatggtaggtgccagtgtttttaaggcgtaactggaataaggcgtcttgatcagtcctgcaaagaagtcagaaccaaaccaaagaataatggctgcaagtccgccggtaactgttgcatagagaaggcctgcctttaagatgcggcggcagttctcatattctccttttgcaagccttgcggatatcatttttgagatagccaccggcatactgtaagaggaaaggatcagaagaatgttgtatacattatacgcagatgtataatatccatttccctgctttccgataatatcatttaaaggcatacggtaaagcataccgataatacgcaccaggataccggccatagccaggatacttccctgtattacgaaatttgctgccttatttttcttttttccctgtactgctttcatttatcttctactgtgctccatgtttattacttaaaacgtgtatcgccacgttttttatttaatttcagacttatcaaagtctttagtagggatgatgcagacccaggtctttccctgatttaatacgatctcattgtggtcatgatcgtaataatgggtcacaccaaattccccgtccttctcccaggtgatagggatggcttttccgtctgtgatataatacccatattcaccggtatgtacattgatgttcagatactgggtagaggcatagaaaccgctctggcagtactggaagatcacatttttcactgctacagggccttcacttccgcggtgtacatccccatactggtatctgtgatacaggccatcactgctgtcatacacaaaatccggcttgttcatagtatatccaggttttgcatgggcagcatctatcacgcctggttttccatctaaagagatctccacgccatctctggcaaaaagataatgccccgtataagactcatcatactctgtactatagcctaaagtcgcaattgcctttttcagacggtctccgcttgtgtaggcattgtgaggagaatgtttatccttgcttctgtaatacgtagtatttccaatagcatccagaccattgatattatccacattattaagataaggctttgcaaaggtactctggccaaaatgagcatagatcgcatcaaactctcttgcaaaataagtataataggtacggcagcttctcactgaaccaatgcggtccagatcatcataattctcgatcactgccatatagcggttcatttccgcttccaccggtgcctcatagaccacaccggcccggttcataccgtactgaggtcttgcctctttgtcattgctcatcatgatagcgataggacgacggtttgcctgttctaccggtaccatctgacctgtaaggaagcttcggatcatgccgtctttttcttcccgttcttctggtaagttatagtccggcaaatctttcgtttcttccttttgttcctcatccgactggatcaggattttgggagcagaagtggctgcctgagtggttgtttcctgtgttgtgggaacctgcgtctgtgctgcttcttctgacgctttcttcccgcatcctgcgcacagcgccgctatgcaaaggatcgttcctaacatcattttccttcgtactgcctttttacttctgctcccttttttcatctggtgtacccccttgtgtccagtatctgtctctgacggtcttccataaccagccgctcttcatctaccatgtggtcatatccacataaatgaagcatactgtgcgctactaaaaatgctaattcccttgtctgggaatgaccgtacttttcagcctgttcctccaccttgtctacagagatcacgatgtcccccaacatcagttctcctgtttccggattgaaataatcttccactgcatcttccacatggtcaaaatcagaaggtttctcataatcaaccattggaaaagacaacacatccgtaggcgcatcgatctgacggtactctttattgatggcctggatggcatcattgtctgtcagaatcacattcacctctgcctcataagggcatttttcaaaatcaagagacgcctctacgatctcctttatgatcttctcatagggaagatccagttttttctctgcttcatactcaatggaaactgtcattaccgattattcccctttcgtgtatttttcactgccggagtttttctttcccctctggcggtctttgacgctgttttcttctcataatcatcatatgccttgacgatcttctgtaccagaggatgacggactacgtcagaactggtcagatagcagaaaccaatatcgtcaatgtttttaaggacttttaaagctgtatccagaccggaagttgcaccggaaggaaggtctttctgggtctggtctccggtgatgatgaccttggagccaaaaccaattcttgttaagaacatcttcatctgggccggtgtggtattctgtgcctcatccaagatgatatatgcattgtccagggtacgtcctctcatgtatgcaagaggtgctacctcaataagacccttttcggaattatgctgataactttccgctcccatgatctgatataaggcatcatataacgggcgcagataagggtcgatcttactctgtaagtcacctggaagaaaacctaacttttctcctgcctcaatcgcaggtcttgtaaggatgatacggcctacttccccgtttttaaaagcctggatggccatagccatggcaagataggtcttaccggtaccagccggtccaatgccgaatacgatcatcttcttgcggatggagtccacataatgcttctggcctaaagtctttggctttaccggctttcccataatggtacggcagataatgtccttatcgatctccaagatctggtcatcattttccgtaaaggaaagagacagggcatagtccacattctgctcggtaatagtattcccccgcatggaaagctggatcaggttattaaatacgctttttgcctgaccaatggtcttttccggaccaatcagcttgatctcgccgtccctggcgatcatggtcacatgaagggtccgttctattttctttaaatatgcatcgaactgcccgcagacatttctctcatgttctgccggaatgtcgatcatggtttcaattacactcatccgtctgtttaatctccttgagttttagaaacagggacgctgactgccgcaggctctattacctttagcgttccgctgatcctgtaaccagatatattcttttctattttatcattattttcaagaatttgtacccctttttcccttaatttttcaacaaattgccgatttgtttctgaagctgtctgttccagctcttcttttgtataacctttctcgtaaaccgtcatatattcccctgctatctttcccacaaaaagcggcagataaaaatttgaaaacagctttaactggatcatatctgcggtgtaatcccagttttctttatttccatttttccccaattcagggatcaaacattcaggcataagaaatgaaaaggaaaaaggacctgcgatcaggcgcagaccatagcgtttccttcctgtaggataacgcacgtcccgggtcagaggcagttctttttcataagtttctactgtttctgccagtatctccccctgtgactgcacataaaaagcagatatctcctgctcatcatccccgattacaggaacacggccactgacaaggacctgtccctgctggatctcttctccttttttcactttaggaattccctggcgcaccatgatataggtaatcgtgccagttacatctgaaaccagatcacagggatcttccttcaccgttgttttagcctgtatgatcttattttccttgatctggatcaccagcctggtgccggatactctggccgatacccaggtgatctgaggaaacgcttccctcatcccagcttccagctcctcacagtttatctttttctttttcatcccatagcgcacatcctgtgtatccagatagcgcaccaacgtatctgcagtataatggtgattgccctgaaaatggatatcccatatgaacaaagacataatatagagcaaaaggaaaaaactggaaagacctgctgccgcataccatcgtttccggtttctctgaagaaaaaacggcagtccccggcgttcgcagatacgcaggcggacacccttacctctggcgcagccccttaaccggtaaaaatcctttaaaaaaagggaacattggtactctccctttttcaagcataccagttcccagaaaaatatcccgtttatcctgcaccgttccagaaaatattccgggctgatgcttttgatctgtattcttacataaccttttaaaaggcgaaaaaaataccggatcatccctccaccctcctttctgataacagatcatcaaactctaccgatcgtatctgtcccttgatctttaaagcatcttccgtataagtctctatctccagatgaagccctttaaacactaccatacagcctgctgcctttattttcacatacgtatctgtgtagataagaaggctcctgaaattttccgctactacttcataaggacctgtaaaatggagcagaacatcccccagtattacatctcttggaagaccaagagcttccactgctgcccgttttctgtcctctctcataccgtttctcccggagccttttccttttattatatgacatccccggccctgaaatgccagtttggctgtttacggctttctgcacccattttttcttttaagaatacactaatagggaaagaatgattgtgaggttcttatgactaattctaagttaaatcctgcttctgaagccatttccatggtaaaagcagctcagacaaatgaagaagatattcctgtaactcctctgccggaccctggagaaggcggacctgtatatgatggttccatgaataatgatcccatggataatggctccggcggaaacggctcgttcggcgatgatctgagttctgttcctgttatccccctgccaaatccaggagagggcggacctgtatacaatggtcctaattacaaccgtccatctggcggtatgggacagccggggaattcccagataccggtataccgtcctgtcttcccgtctaatggctccattaccgttctcccaggtatcagtttcccctgttacaactgcactacctcctcaagccttggccgggtacgcattttaaatgcttcttccggttatccggcatttaacgtatctttaggaaactggcgcattggagagcagttggataacggggatctcaccagctatgtacaggcagcctccggcttccagacggttacagtatccggcactaacggttatatctatatccagaaaatgatcaccatccgtgccggttctgcctctaccgttgcgatcatcaataccagcaccgggctggatctgatggaaatatccgacctttcctgcaacggaccatccggcactgcctgcatccgtgcctgcaacctttccccggaccttgggccttttgatgtagctttagaaaaccgcggcaattcctaccgcaccttcaccaacgtccgcttccaggaagtaaccccgttctccagtttcgcatccggctggtattccatctacgtattccgcaccaatgcatttaacaacaataatgccattgcagcagcttcagcagcgttaaagaccggcggatcttatacattatatatgtttaacgggccgtcaagtacggatgggcttaggacgttgatattatcgaattaatatctttttatctgcataacaatataagaaccggaagagctgtgactcccattcacagctcttccggtctttcatactttgtattcacttactttctatccctttccagatttttaatgctcagatctcttccaaaaccaacatcggttccaaactgtttaaacagatcatatgccagactgtctatggtggaaatatgcatctgggactgctgctctaaccaggcaagataacgttgatttttggtcaaagcatacttcttcaacaacattttctgcagcctgtcattcatctggttctttctttgcattaaattttctttaaaatataaaactgagtatttcggtcccataaacattccttcccccgcacagtcgttccaaacccttttgaaaaatcaagttcaccctgccattccagtgcagcagctaaagtgatcccatcgcctgcctgtttttcaaccaacaatttcccacctgctgcgcaggccgaccgttcacatacatttcctaccccgatctgtttttttacaaaggcagactctttaaaatcgcctggaacctgatttaactgttctggcgtatagaaacgctgctcacagggttgatgtaaacattctccgtcaaatacctgctttaaacctaataccgcaggttcatcctgttttacatctacagaagcaatagctttcacagcggccggatcgatcccatgttcttttaataaggcaaaaactttttctttcataaattccggatctgttcccctgcggcacccaacaccaaggacaaccgccctgggaacaagacgcaaataagaagcttttttttccggaaaagaaggatcctttactgtgatacaaatattttcttcacaccatctatccatcacaaagccgtctggcaatttttttattggaagatcactgaaaacaccgatctgctttccttctaatactgctgctgatatgttcttcgcttctttccggtctatgatcgtcatatgataggcagatgcaaacagatctaccgcaaacttcccatttacatccgttgctgtcgtgatcacaggcactgcctccagccagtctgcaatgtgccttgcaagttcattggccccgcctacatgccctgatagcaaggggatcacaaactgcgctccttcatccactgtaactaccggcggatcagtcatcttatccctgatccatggcgcaatagcccgcactgcaatacctgtggcgcttacaaagatcattgcacgcttttctgcaaacatcttgcctgtccattgggataaaaactcttcttcccgttctttcagtccttcttttttccactcttcccttaagaaacgcttgggaataatcgcttcacattcttcgcccgtttcctttaatttatgaaaaagacgcctgcaaacccaggcgcctcgttctgtaaaacagatcactgcatatttcatcctgctacctgtaccttcttggatcaaatccggatcagaacatatagtttcattctgatcaccagcttttcctacattctggtatcagtatactggattttcagctttctttcaatgcttcctcttttaattgccgtttccggccggtgatcatccctccaatgcggccgctttccttggaagtaaggcttttccagcctttctgcaatactttttcatctaatcccagttcctgggcgatctcaaattttaactgttcatccggtgtcatattatggacatcaaattcttttttcttttttgactttcccataggtctatactccttaatacgtgatgtattttcattggtctgttataagaagtatgccctttttacaggaaatcattcaggaaacactgagacggcacctgctgtcggctgtttttccaaaatgcaaaacaaaaagagcagccccgcaaggaactgccctttcatcatttacattcagttattactttgcgtaagaatcgatatctacgtcagcaacatcttcgttctgaggagctgcctgaagagcctttacgcttaagctgatcttgtgatcatcttcgttgaaatctacaaccttagcttcgatttcctggccgatctttaatacatcagctggtttctcgatgtgctctctggagatctgggatacatgaagcagtgcatcaacgcctggctctaactctacgaaagcgccaaagtcagtcatacgagcaacacgaccggttactacgctgcctgctgcatacttctcagctgcatgtgcccatggattagcctctgggaactttaagcttaatgcaatcttctcgccctggatatctttgatcagaacggttaccttatcgccggacttgaataccttcttaggattttcaacacggccccagctcatctcagagatgtgaaggagaccatcagctccgcctaaatcgatgaatgcgccgaagtctgttacgttcttaacagttccttctaccttatcaccaacctggatcttggagaacagttcttctttcagtttagccttttcagtaactaacaactgctttctgtcgccaatgattcttcttctcttaggattgaactcagtgattacgaactggatttcctgtcctgcgtacttggaaagatccttctcataagtatcagatacaaggcttgctgggataaatactctggagccttctacttcaacgcttaaaccgccgtctaatacctgagctactttcgcagtcagaacttcctgattttcaaatgcttcttccagacgcttgttgcctctgtcagctgccatacgcttgtaagataaggataccatgccaacaccatcgttcagcttgataaccttagcttccatttcttcaccaacctgtaccttggtagttaaatctacactattgtcattgctgtactcgtcacgggtgataacaccctcagacttgttgcccgcaatgctcagaataatctcatctttattaacttcgatgacctgaccggtaactatctctcctgtacgtattggtttggtggattcttcctcttcctttaataactctgcaaaactctgctctgccattctggtatgaacctcctcaataatcttttttggggtggatgccccagctgtaatacctacgctgcgcacagaagatacactgtcaggatctaaatcgccgagtgtctgaatgtaaaatgtatttttacattccttgagacaaatctcgtaaagcttctgggtgttggaagaatgtctgccaccaatgacgatcatagcctccaccgaagatgctatccgggctgcctccacttgtctttcctgtgttgcattgcaaatcgtatttaaaacactactatcataacccttttttgaaattttttcaactaattcttgaaatttgttgtaattaaatgtcgtctgggatacgatacatagctttttgccctctggaaggttataatcttctgcatcagcctcattttccacaacaacagtgtcaccattgccccagccccggataccttccacctccggatgcaccgggcttccaatgatgataacagcctctccggcccgcgaatgttcatctacgatcttatggatcttttttacaaaagggcaggtggcatctaccacatttaccccacgggaatttaagatatcgtaaacatgacggctgactccgtgagaacggatgatcacggttccctgaccttccggcaggttttcaaggtcttcttccgtatctaatacctggacgtccttttcttccagatcacggactacttcctcattgtggatgatgggaccataggtatagatgggaccctgggcttttccctcttttacagcctggatctgctcatagacccgggctactgcccgttctactccaaagcaaaaacctgcacttttagcaacaatgacctggcgctccattatgcctgtcctccgtctgctttgtatcccttttcacggacgatctttaaaatctcttctactacctgggccagagtcatagaagaagtatctaacaacactgcatcctctgcctgctttaacggagaatgttctctgtgcatatccctgtaatctctgtcttcaatgtccttttcgatctcttttaaatctgctttcattcccttttctaacaattccttataacggcgggctgctcttacctctacagaagctgtaagatagatctttgcaggtgcatctggaagaacacaggtaccaatatcccttccgtccatgatcacattttcctttgctgccagctgtttctgaagctctaccagtttttctcttacaggcatatagccggatactgcagatgccatgtttcctacttcttctgtacggatcaagccggaaacatcttcaccatttaaaagtacctgctgcacaccgtcctggtaacggatagtcacatctacttccgggcatgagcgctcgatctcttctgctgcctttggatctacgccctttcttaagaaataaagggccatagcgcgatacattgcccctgtatctacgtatacaaagccaagttcctttgccaccagctttgcaatggtgctttttcctgctcctgcaggtccgtctactgcaatattaaaatggttcatctgggtgttctcctttaactttcatatagcaataccgcctgtctggcgatctgtctgttttatttaattttgtttagctttcctgtatcttctccgctgccgcctttcccgctgcccagccggtagaccaggcgatctgcagattaaatccgccggtcactgcatccacatccaggacttctcctgcaaagtacagattttctgcctttttcgcttccatagtagacggattgatcccctttacatctacgccgccctgtgtaataatagcctctttaaacggccgaagccctgtcagtgtgaacgtcagcgctttggtagtttctaccaggcggcggcgttcttctttggtgatctcatttacctgcttatccgggtcaatgccactgcgctctatgatcacagggaccaatttggcaggatataaatggtttaagctgtttttaaactgtttattctttgcctctgcaaaatcccttaaaatgcgctcatccagttgttcctctgtaagagccggttttaagtcgatagacagctttaacaggttcttggcaatggccttggcacagaaagaactggcgcttaacataagagggccgctgactccaaaatgtgtaaacagcatttccccaaagtcacggtacagttcctttttgccgttagatacagtagcttccacatttttaagagaaaggccctgaagggattttacaatctcaagctctgctgtctcaaatggcactaaggctggtgaaagggctgttaccttaagtcctgcagcctgggcccactgataaccatctcctgtggatcctgtagatggataagacattccgccggttgctacgatgacgcaatccgcatccacagctgtcttttttccattttcttccaggaaaatgcctttgcagatggtcttatcttcttctgttataaagtttaaaccttttacttccttgcgaagatatacttttacattttctttctttaatgtgcgatctaaggctgcgatcacatcggaagaatgatccgataaagggaataccctctttcctctctctgttttcaggcgcagtcctgcatcttccagaaactgcatcatatcttcattggtaaagccgtaaaagctgctgaacataaatttcttattggtgatcacagctgcaaacagctcgtccatatcaccggcatttgtcacattgcagcggccttttcctgtaataaagatctttttgcccagcttttcatttttttcatagaggcttaccgcacagccttcctttgctgctgcaatagccgcgatcatacctgcggcaccgcctccgatgacgattatatttctttggttgctcatgtattgttgtttcctttattatatatattcgcgtttcatgcatcctgtttcatagaatattgaacctgtctgttagtataacatacttatttataaatttcattcatatcttatatccagatattcaggtctttgcatttttttcaaaaccatagatccattttccacggagaaacaaatacaggaaaataacagaactgatgctccaggtcagaggatacgcccagaataccatacggatatccgggataaaatggactgccactgtaatataacttacacggaataaacaccatacgcaaagcataactaccataggaacagaagcatttcctgaaccgcggagcacagctgcaatacaatgtgaaaaagccagcacacaataaaacagcgaaatggtttttgcctgcataacgccataatggactacctccgggtcgctgttaaaagctgcgatcagaaccggagatactgcgtaaattgcaaagccgatcagttccgcaatggacatagaacaaaggataccaaaccatgcccctttttttgcacggtcatactgcttcgcacctaaattctgactgacaaaagtggtcagtgccatattaaaacaggttacaggcagaaatacaaatccctcgattttagaatatgagccacagcctgccattgccatttttccaaatgcgttgatatttgactgtacaaacacgtttgcaagagcgatcacagagttctggaagccggaaggtacaccattctgaatgatctggctcaaactcggtccatcaaaacggatcttaccaacctgcagctggtactcttcttttgtccgtatcaaatggatcatacaaaggatcgcacttgtaaactgggaaatagctgtcgcaagggccgctgacccaacacctttgccaagacctgcaataaaaaatatatccagcacaacgttgatgcaggaagaacagatcagatagatcagcggatgacggctgtcacctacagactgcaaaattcctacaaaaatattgtacataacaactccaagggagcctgcaaaatacgtgcgaaaatatgccactgactcaggaagcacctctgccggcgttcccatcaaaaccaggatcttcggcgcaaaatacatacccactacagtcagcacacttcctgccacaaaaccaaaagccactgtggtatggatcgccttgtgcaggttgtcactgtttttcgccccataataccttgcaatgacaacaccggctcccattgcaataccattaataaatccaaccattaaaaagatcagattgctggatgagctgaccgccgccagtgcattacttccaagaaaattccccacgatcagtgaatccgccgtattatacagctgctgaaacaggtttcctaaaagcagtggaatggcaaaaaagatgatcttttgggagatgcttccttctgtcattcttgttttgcttgctgtgttcattgtgtgtgccccatccttttgtattttaattgcagatcatcctgccgactgcaatatccctttcaatatccgcaaattataaacattttaccgcaatatatcaattttgtttggatatattgcggcaaaatattaagtccccaggatatcttgcgaataatgtcttatgatcatatcctttaaaacttcgtttaaattacttttttaaatttatactttccttttccataaccaggtaccggtctaataatatccgcctgcactaaattagaaagaagtttggaagcacctgagcctttcaacgcaagaagttccataactgcacttcttccaaatgcttcatcaaaaccaaactctacaaagagtctatggatatgggcaatcgtttttgctgaaaaaccgttgttttttgtgaaaagtacatttccaatgtccacttttgcactttgaatgtccacttttacatttccaatgtccactttttcttcatttaaaagtccacttatgtgaagattgcgattatggagctcattcttctcatttaaaagtagatttcggaggaatacttcaagatattctgttgtttcatgaatacctttctgcagattcgtgtaatttgcacggacaagcgcatttctaaaataccatgcattttccgcaaaaatatcattggttgcagagaaaccaagtattctcaaatatttgatgaaaaacactgccgttgttctcgtattgccttctccaaaaatatggatctgccataaatttgaaataaataccgcaagatgatgaataatctcgtccatcgaaagatatttataactaaaatttttctcctgtgaaaaatcatattcaagggttgctctcaattctgaagcacttccatatataacagttgctccatcaagcacccactcttttttggttatgttataatctctgatctttccggcgtgtttgtaaatacctttttccatactcaccacctcacttttttatttttgattcatctacgtcaaaacacttcttatcttttctattaatgtaatatcagcaggcaaccactctacatcatttagctgagccatagttagccattttgcagcctcatgttccttcagcaccaaatctccgtttattacttcacaccagaagcaattcatagaaagatgaaattctggataatcatactcaatcgtatctattaattctccaacttctatctctgtatcaagctcttccataatttcacgctttaatgcttcctgtggtgtttcgccaacttcaatcttccctccaggaaattcccagccgtcttttaacgcaccatatcctcgttgtgtagcaaaaataattggttctccgtctttattaacagcttttataacagctgcaaccactcttattgttttcataatttcctccatttacgaatttacaatatactcatagatatcctctcgcactggaacatctagaatccactcgatttctactgcagtcttctctgtatttaccatagtaaattccttagtatttccacttgctgtcatatgtccaaggtaatagaactcttttgaaatcttatcatctttattttttctcacaaagagttctacctgaatgccacgttcctttgccttcaaaaagttctgcacatcctctgatttcaaagttcttcctgactttgaaatagcaatcagccgatctctagatcccggtataaaatgatcttcgtatttagtagtgtcactgatattttctgatttatcataattgataaataccggaaatgttttcgtttttttatcaaacttatagccaccaatatttaatggcacttcattctgttcccaatttaaaaggcggcagacatcctcatacgtatatttttgatataaaaccaaatccgtctgcttatatgtatttttataatttctttcataacgacgaataccaaactcaacaagttcctgaagcatttcataaaacttatcatttaacagcatctgcataaaggtttttgttggcttataatcagttccatcatcttcaataaatacacactgagaatatgtcttctttcctgaaccagcaggaaattcattcgtcataacattcactatgttttccttctgattctgactaacaattttcccatattccttcatatcttcagaaagacccgcaaacaaaccaagttttgaacttcctcttgcatatgcaagcatcctctttaacattctaagttcctggattcttttcccatttgctaactttttcgaaacaaattcgattactttctcctcattttctgataaacgaattttgtattctttctcatacttcactaaaaatttgtaatatgatccaagactgttattatcaaaaattctgataacatccatctctccgtaatcatcaaaatcgagtaatctaggaatatgtccaagtttattcttcagattcgtgtaattctctcttataagctttatatcgctaaaattcgctttatctacagatacaaaaattctctttctgctaatctcatcaaagtgcactgtagatgcccccggaatcactcttccaccttccatgatgtatctacggatattgtctttattgtaagttctatctcctgataatgcaatcgggatcataaagttattattatagtttccaataaaatcaagaattaccacatattcttttccatatgcttttcgtaagccccttccaagctgttggataaatacaattggcgattgtgtt

SEQ ID NO: 3561 - DNA, 2343 bp, Unknown
  gut microbiota DNA sequence
tctacaccttcgtttagtatttcaacagaaaaaatataatccaatggctcatgatctgctgttgcatcttctttattcatggcaagtctctcaaatgcattctgtcgttcctgttcagaggcacttccattcagcgcaatcgttctaaatttctgtcctgtagacggattgatcatatgattaaatttttctgatagttcctccgtttctttgatgctactacagaaaatcagccctttaaccttgtcaccactatatccataataatccgcttcattaataatatgctttactcgttcatcactggtaagcacggaaaagtcacgactagcttcttcatcatctccaataattgctaaatccgtgattccaaaatagtggaatggacaaaggagattttcttccattgcctgctgtaatcgaatctcatatgcaatctgatgatcgaatagctcataaacatttctgccttcaatattatcatctcgcttatccggagttgcagtcattccaagccaaagttttggagtgaaatgtttcattactttctgatatgtatctgcaggaacatgatgggcttcatcagcgtatgtcaagataggtctaacaattttttttgccatattttagatggcagagaacaaccttaatttcttatcaacaattggcctgagattgtaccatctgttttatcagaccttaaaatataagtaatttctatctcatccttcattggttttaataacaaagccggaccaatccatactttttcatttggctgtaaactacgtatgtaaaattcatatgtactatctgcattttccattgatgtcgcaaaatatttctgtatctccctctcataatcactagcatcatattgtggtgcattgttcccgaaaggagaataattaaaataatgctttgcgttagcaatattatcattaatgctatatgaaatatcctcatcgtatccaatattttcatctgttggcatcatcaagacttccttaaatttgatttcctcatatagcatcccttcaacaccttttagttccggattaatagtattcctatctgcatttataataatagcactatcattctcgacttttaaataaagtgaaattcgcgtatcatttactgtagaaatattggctatagccaatggaacaatgatatatggttcaaatgtactccaatacattttttgcatgtgtaatttacacagataacattgcaaatcttcaatcaacttgatttttctttgttcttcttcagtaccaatatattctgtttttttatccatcaaatccactttgacttttaggtctcccagattccaaaaatcaggtgctggtacaaagcccatagcatcattcaaaacactattgtataaaatcttactttcttctgagatttctttcttcctcggctttgttagtcgttcagtaatatcatcactttccgatatttctgtagttccacaggataattttatagtattaatttcatcaacaaggctttttattttcttaatccatgcatcataattcttctttaagtaatcactgtttataggattatatttcacaatgtctgatacaatttccccattaacataagatcctattctatatgctgccattccatttttaggtctaactccattttctattacattcatcactgtatccgcgataatatttctgatattttttcttacaacagctttatctttgttattgagtgtataaaatgttaatcgtctatgttctaaatcaaacggcatgcagtttgcatttccgtaatcttcatttgctatacaaattatattctcccagccaattacaccagctgcataccctaattctaaaaggacattcggattaggtgataatttttgtatttgtacatattctccattttcatttaattcataatgttctgaattaattatgcttacatctgcaacaaaaatatcgcactgttgtattttttcaaaaatcacatttgtaatatccgggcttccataattcccccttgtatctctattagcctcaacatatactgtatcctttaatgttttaactgcagcatctatgcaactttggataaaatttcttgtttcagcccctggcaaatccgattgccatgaataaaaaatattaatattcgccatgccatctcctatataaatattaccttttttcttttcacatatataatctctatgtcatacccaagctattccatcatctgcgcaaaggtcttattaacaacactatcagtccttttgataatatgattcacatatgattagctcctattaggaaaacacactgt

SEQ ID NO: 3562 - DNA, 1693 bp, Unknown
  gut microbiota DNA sequence
ccatttgaaagtcttttctctttgttttcccttttctcatacgtttaaaagcctttttaatcacatcttcccggcaggccagccgatacaggtatctataacttttctttttcttccagggaatcccggtcaccttttcaatatcgtatttcaatatacgcatgatcttctatctcctcgccgctttcggacatttcctgctacttgcagctcctgaccggaactatttccactcaccaaaacccataagggcggatataacgatgtttcaatcgtctgcggtgtaggattaccgggaacattttggttgtcgttctaaaattgatagaaaaaggacgcgccgtagttccaccaggcgttagcagccacattgttcagtgtgcgggcccagaggccgtcattaagaccgtcattgcaattgccgaaccgtagcgaaaccgccggaaagggtgttccggtaacccctaaaattcgtttattccctgcaagggcatcgggggaaatcccccgaaccccctattttctttatgggggaagacccccataccccctaacagcagctcacgctgctgcaggtgctggaagaagtaaggacgcgccgccgttccaccaggcgctagcagccacacagttcagagtgcgagcccagaggccgccatgaagaccgtcaccgcaatggccgaaccgcagcgaaaccgccgtgattgtggcgtttacccaagtatgatcacaatagccagttgcggaagttccctcaatttcctctgacggaattgctccaaaacctttgactacatgcatggtcgcattgtaatggtttgctgtcacgttgcagccagtatccagatacccgtctccactcagattgtaggtatagtctgtagataccttaattcttccattgactgcgaccatatatggatcacgctgccaaagcatataactgcccagaacagcgctatgaaaaatcttattgaaagacttattatcatctgatccataaaactggccgcctccaactaccttgttgatctgagttccataatgctgggctttatcctctacatagctggagcacattccgcttccaaaagaactttgtgaatctgtgcttcgcgtaagcattacacaaatatctgctaacgtatttgtaagcgggccgccgaagaataacccgtttgcactcgttttcaaaatcgctgtgttctgctctgtagtgcctattgcggttcctgatgaattatccgaagagcttcctgaagcagtcaggcagctccactggcctgcaatacttctcatccttccatttccatcaatagagccatagaacataggaatgagcatgtagtccctaacttttcctttgacattaaagccaacaggctggaaatccggatcaacctgccgctcgcagaagtacacataacgatctgaaccgaccttatattcctttttgtagatcttcttaataaccgccatggcatttcctgcaaaatttgcatttgatacatctgaagctgttccgtctgctttcttcgtataatcatccggattcagataatatttgatttctccatcccatccgcacataaccggcacattcgcttttaaccagctccaatccgcccaggagccataatccatggcatgagtagccatattcatggacataggcttaaaatccttgttagca

SEQ ID NO: 3563 - DNA, 23704 bp, Unknown
  gut microbiota DNA sequence
atgctctttcagatacgttttccgcatcattccatatttcccataatgcggttcttcatctgtactgacaagattcggatagtaaattccgtctgcaccaagtgtgtaggttccacccattttttcaaatgtgcttttcatgtgttattcctccttgaaatcagcgatgtccttagatcatcgcaaaatatttcagggcagccttgatagcttcttccttctctttcgggcattgtggaactcttgcattttctgattttggaagattatagttttctcccacttcaattccacatttgcgttttacctgagaaatatataaacttgaaaccttcaagccaaattctttcaacacataatctttgatttcctgataggttgctttcaactcggcactggtggcatccagctcgtccaggtctaagtcgatctctatcgtgtcatccagcttctgttgggtcaaaagaacaaccgtctcaacatgacaactctgcccaaacatatcgcagcatcttaccttctctacctcatacccgccatctgcaagatatcttaaatctcttgccagcgtagaggagtcgcagctgacataaaccacccgtttcggtgccatttttaaaatggtatccaggcagacctggtcgcagccttttcttggggggtctactacgatgacatcggcgtagactttgttcttttcatactgttccggaaggacttcctctgcctttccggtgaagaattctgcattggtaatgttatttaaggcagcattccttctggcatcttcaatggcctggggaacaatctcaacaccgtagaccttctttgcattctgggctaaaaacagggaaatggttcctattccgcagtacagatcccagactgtttcatttccggtcagtcccgcatattccagggctgttccatacaatttttccgtctgcaccggattgacctgataaaaggacaacggagagatctgataggtcacatttccaatattatcagtgatgtaaccagggccatataaatttacgatctcttttcccatgatcacattggtcttttcctgattgatgctgtaggaaatgctggtcatgcctttcacctggcacagttcttctaccagctgttcctttgccggaatatcttttccgttgatcaccagacagaccatgatctcaccggaatggaagcctttgcggatcagtgcatgacgcactaagcccttatgggtcgtctcatcataagggcggatcccatggactctcataaatcctttgataatgcctaaaatatccttattttcttccacacctaacagacagtcttcacactcaataatgtcatgggtacggcctgcataaaatccagccacaatatttccatttttatccaacccaaacggaaactgtgctttgttgcggtaacgccacggctctttcattcccatgatgggaagcatgtggatctcatcttccttaaactttccgatccttaacaggtggttttttaccttacgctctttaaatttcagctgctcttcataggacatagcctgaagctggcagccgccgcactggcgggcaaccgggcactttggctctactcttgcctctgacgacgtaaggatctccatcaaccttgcaaacccgtaatttttcttcattttcatggcacgggcacggactacatcaccgatcactgcatctttgatgaaccagatataaccatccagtttgccgatccctgcgccatcttcacttatatcttcaatggatactgtaaattcctgatttttttccatatttctattttactccgttgttctgcggatattagagtctaagaaacggttaaatcccaaccatcccttgatttcgccaccagcatttaatgcctcgatcatggtctccatctttgcatctgtcgtatctgcaaaattcagtgccagtgcctcaagtaaagccggcttcttaggagaaccgtattccagctccccgtgatgtgccaggatacagtgttttaactcaactgcaatacttgccggaaagccttcgatctccttcatacggtctgatatcatttccgtgccaatgatgatatggcccagtaactgtccgtcatcggtataatcattttccgggaaacgggacagttcttttgtcttgccgatgtcatggaaaatagccgctgtgatcagcagatcacggtttaactctttataatatcctgcgtaataatcacacagctttgtaacacttaacgtatgctctaacagtccgcctacaaaaccatgatgaacggtctttgctgcagaatggaactggaatgcttttgcaaaagcagcgtcatctacaaaaaagctggacagcaggcggtttaagtacgggttctttacgctcttgataaatgccagaagctcttcatacatttttccgatatcccgcttggatacaggcagataatcagactctatatactctccttctcctgccttgcggatgcggcgtacatttaactggttggagttctggaataaggtcacatctgcttcaatgcaaacataatccatggtatcaaagtctccaacaccaggagaatttaagtcccagatcttggcatcaatggttcctgtcttgtcctgaaggaccaggttgccatattcttttccattttttgtaagctggatctgcttatttttacataaatacacatcagatacgtgcataccttcacggaaggtttcgatatatctcattttcttacctcatcttttctaattttgattttttccataaaagagagcccggcacctttcctacctggctcccactgttacttcaaattcaatctctttgtactcatcttttccattgtttctctggactgttactgtaatgcggtctcctacatggagtttttccacctgggcctggaaattcttcattccctcgatcttaatatcattgatcccggacaaaatatcaccaggctgaagtccggcattataggcaggactttcggcagctgccgcgatcatataaataccagatggcattccatttttttccatttctgaagtaacttcctgaccttcaatgcctaaataaggcacctggatcccattacttaaaagttccagagctcctttataatcagaaatggacataaatgttttcatgcctgtatccacatcctgctcatagcggtctgtggcccagccaaccagttctccctctgtattaaacaggaaagtccctgcatctgccttacttttgatatccgcatacagaacacgggcatttccatctgtcatctgtacatttttagctatataggaaatgaaaccatagctgctggagtgtaccatacctgccggtgaacccatggatataaccagatctccctgtctgaccccataggaatttcccagttttaccggttttatcttctcaaactgtgcatcatccagtgaagtagcatctacacggatcatggtcagtcccatccgggagtctgtctgttttacggctccaggaagaacggcactgtctgaaaatgcaacttccagagagtctgctgtctctattgcttctgttggtgccaggatcagaacttcttcttttctggcatcgatcacaacacctgaaaactgtcctgtggtttcgattgggttatcaaaccagtctttttcatgctggatggaatggatcgcagcaatggaactatctgcttctgataccagtgtccttaaatttccgtacatcttgttcagatcttccagagaatatggatatttttccaactctgaacgaactttctcttctaccggttctgtctcttctgttgaagcttcctgagtctgctgtaccggagctgatgtttccggttcatctttcggtattgtaatggaacggctttcttctattttttcctgtcccattatctttctgactaccgttttcgtaactgtaaaacaaaccgccgatatggtcccaaacagtactgcacaaataacagtcaatataatatatctgacgatctgccttcttgataacggctgacgcacgatcttctcctggataaactgccaggaacgctcttcttttacgttgtcatccttatctgtacgcttatccgccattgcgttcctccttgcgaagaatcttattcctattataaggttcttcctgctattatgcaagatgttctatgggattcttgcgccaaaagtgcccgtcttactgggttttctccccgcaccacctaagaaatttcccgtagtaaaacagaatgtttactggtataatgtaaaggcgcaaagaaaaaacaagcgcttattttcctatcactcggaggaaccaacatttatgaaccaaaaagccttaaaaactttagaatatacaaagatcatcgcccagctggagtcccatgcggcttccccactgggtaaagccctctgccgggatcttgtgccatcttctgacctggaagaagttcgcacctggcaggcgcagaccaccgacgcggctgacagagtccgcttaaaaggcactgtctccttctccggcctgcgggacatcggcagttccttaaagcgtctggagatcggcagtgctttaagcatcagcgaactgctttctatcagctctgttcttacagttgctgcccgtgcaaaagcctacggccgtcaggacgtcccggaaaacacctttacaccgcgttttccaggtcagcagccaccgaaacagacagcagccgaggaatatgtgcctgactccttagacccgttattccaggccttagagcctcttacacctgtcaacaatgagatcaagcgctgcatcctttccgaagacgagatcgcagatgatgcaagcccgggtctgtcccatgtgcgccgttccttaaaggcctgtgcagaccgcatccatacccagttaaactctatcctgaactcccaccgtacctatttgcaggacgccgtgatcaccatgcgtgacggccggtactgtctccctgtcaaatcagaatacaagagccaggtttccggtatggtacatgatcagtctgccaccggttctactctttttatcgagccaatggcgatcatcaaattaaacaatgagatccgcgagctggagatccaggagcagaaagagatcgaggctgttttagcttctttaagcaaccagacagctcctcatattgaagaactgcagatggacatggcactgttagcacagctggatttcatttttgcgaaagctgcactttcccaccagtaccgctgcacagccccaattttcaatgataagggctacatcaatatcaaggacggacgccacccattactggaccagaaaaaagcagtacctatcaatgtatggcttggaaaagactttgacctgctgatcgtaacaggtcctaataccggcggtaagaccgtttccttaaaaaccgtaggtcttttcaccttaatgggacaggcgggacttcacattccggcctgggaaggttctgaattagctgtattcgacaatgtatttgctgatatcggtgatgagcagagcattgagcagagtttaagtactttctccgcccacatgaccaatacggtacgtattttagaggaagcagactcccgttccctctgccttttcgatgagctgggagccggtaccgacccaacagaaggtgctgcccttgccattgccatgctgtcatttttacacaatatgaaatgccgtaccatggcaaccacccattacagcgaattaaaggtatttgcacttactaccccgggcgtggaaaatgcatgctgcgagtttaacgtagaaacactgcagccgacctaccgcctgctgatcggtgttccgggaaagagtaatgcgtttgctatttccaaaaaacttggactgccggactacattattgaagatgcaaagaaccatctggaagcaaaagatgagtcctttgaggacctgcttaccagcctggaaaacagccgtgtaaccattgaaaaagaacaggaagagatccgttcctataaagaggagatcgcccagttaaaatcccgcctcacccgcaaggaagagcatctggatgagcgcaaggacaaggtgatccgcaatgcaacagaagaggcacagcgcatccttcgtgaagcaaaagagactgccgaccagaccatccgccagatcaacaaactggctgctgactccggcattaacaaagaattagaggcccagaggaccaaactgcgtgagcagttaaagaaaacagacgacaaactggcagtaaaggccaaaggtccaagccagcctgtttctgccaagaagttaaagatcggtgacggcgtaaaagtcctttccatgaacttaaaaggtactgtcagttcccttccagacagcaccggaaacctgtttgtacagatgggtatcctgcgttccaaggtcaatatccgtgatattgaactgatccgtgaagacgatatcagcgctaccttaggagatggttcttcccgttcctacggtgctgtttccggtgtaggaatcagcaaatccaaaaagaccttttcacaggcaaaaggctctaattccggctccggacagatcaagatgtccaagtccttctctgtttcaccggaagtcaatctgatcggtatgacaacagacgaagcagttcctactatggagaaatacttagatgacgcttatctggcccacctgccaagtgtacgcgtggtacacggaagaggtaccggcgccttaaagactgcctgccacaagcgtttaaaacagttaaaatatgtaaaagacttccgtctgggcgaatttggcgaaggcggaaccggtgttactattgttacattcaaataggaacataatctaacttttagggaggtaaattgtaatggcagaaaaacagcggatactcattgtagatgatgatgccaacatcgcagagctgatctcgctttatctgatgaaagaatgttatgaaaccatgatcgtaggcgacggggaagaagccttaaagcgtttcccggaatttaaaccaaatctggtacttttagacctgatgcttccaggtatggacggctatcaggtatgcagagagctgcgctccagttcccaggtgccgatcatcatgctttccgcaaaaggtgagatctttgacaaagtccttggtctggaactgggtgctgatgactacatgatcaaaccatttgactccaaggaactggtagccagggtaaaagcggtcctgcgccgttatcaggcttcacctgcagctgccatcacagagccgaaacagcagggcgattatgtggaatacccggacctgatcgtaaacctgaccaactattccgtcatttacaaaggtcattccattgaaatgcctccaaaagagctggagctgttatatttcttagcttcctctcccaaccaggtcttcaccagagagcagctgttagatcatatctggggatatgaatacattggtgatacccgtacagtagacgttcacatcaaacgactgcgtgaaaagatcaaagatcacgccagctgggccattactacagtctggggcattggctacaagtttgaagtaaagaggtgatgtaatggcccgctctctttattccaaatttgtcctgggctacctgatcttcggccttttaagcgtgcttaccattgccaccttttcttccggtataacccgggattatctgatcaaggaccgggcaaatgccctttacgatgaggcaaatgatattgcggcttcctgcagtcttatgtatcagggccagcatcaggatatggatcttttttccacacaattaaaaaatgtgtccacctatctgcacacagaaacatgggtggtcaacaaaagcggcgttgtgatcatggacagtaaaaatggcagccgcgtccataccaccatcccggattttgaccccacggcaacgggaaaccgttcttataccatcggcacctattacaagttatttgaccagaatgtactcagtgtttccgctcctgtgaccggcaattacactacgtatggttacgtgctcatccaccttcccatcagtgagattgcaaattcccagagccatattttggacattctctacatgacctgtgccattatctttggcctgtcgctgatcatccttgtagtatttaccatcacggtatatctgcctctgcgaaagatcgcagccggtgccaatgaatacgctgctggcaacttaaactaccggatcaaggtaaagacccacgatgaaatgggctacctttccaataccctaaattatatgtccgatgagctgaataaaatggaagaataccagcgcaatttcattgccaatgtctcccatgatttccgttcaccgctgacctccatcaaaggatatctggaagctattttggacggcaccattccgccggaaatgtatgaaaaatacttatccagagtgatttctgaaacagagcgccttcataaactgacagaaagcatgctgactttaaactccttagatgcaaaagggtttttatccagaactaattttgatatcaaccgggtaataaaagacactgccgcatcctttgaaggaacctgtgactccagacatatccgctttgaccttacattttccgataacatccagatggtctacgcagacatgggcaagatccagcaggtcctttataacctgatcgacaatgccatcaagttcagccatgatgactctgtgatctacatccaggcatccagcaaatacgagaagatctttgtctccgtaaaagatacaggcatcggtattcccagagacagcattaaaaagatctgggaccgcttttacaagacggatctttccagaggcaaagataaacgtggtaccggccttggtctttccattgtaaaagagatcatccaggcacatggtgaaaatatcgatgtgatcagtacagaaggggtaggaactgagtttatcttctcccttccaagttctacctctttataaaaatttttagacgaccggcatattttaacttttccttacgatttgctccagagcccctttttaaggggttctttgctttaaaaaggggtggaactgtgttatactttaatgagccaagtagaaaaacaagcggctgcgttagcagacatttgtttttcccaaaaactgctctcaggcaatttttttaaagaaaggacgatgaataatatgatccgtttaaaaaaagtaactgccgttcttctttccgcccttcttgtttcttcctgcatggcaccctgcacctttgctgcaagcaaaacaaaagtgggaaagatcaatctgaccattgacacggacatccgttccggaagcagcggcggcgaagtagaagtaactcctaccggtgacaacacagaatatttctacatcgactccgtggaagttaccaatgacgaaggagatgactggagcaagtccaatccaccggaagctgagatccgcattggtctggaagatgaagatgaatataccttctccggttccagttccagcaactttaagcttacccttgcaagctctattaaatcccgttatgacaaggtagaatatgtaagcgcaagaaaaacagacggcggcgctaccatcatcctgaacatccgccttgtatttgataaagatgctgatatgagcaatgcggctgcaccaggcagtgtagaatggagcgcttcctctgaaggtactgcaacctggggcgatgtttcttctgccaaatatttccaggtacagctgtataaagacggtaacctggtaacacctccagatggttccgcttccactgtttccgtatatggaaccagctatgatttctccagctgggtaagcgcaggttccaaatacacctttaaagtacgttccgtaaaagccagcaacaacgcaaagagcaaatgggtatcttccagctcctggaccccaggctccaacacttccgataacaataataccaacaccttcccagaaggctggcagaaagctgctgacggcatccgctggtggtggcaaaatccagatggttcctaccctgcatcccagtggaaggaaacagatggaaaatggtactatttcgatgcggaaggctacatggctaccggatggatcaatgttggcggcgtagattactgcctggctcctgacggcgccctgtatgtaagctgcactacaccagatggctacaatgtagacgcaaatggtgcatggatccactaattcattgctgcgtgctttgcactcccgcaattcaattacatatgaccacaaaaaacccgctgattcgatcacatcagcgggtttttctttatttcaaattttctttatttcagtttttatttattccagattttaattttcttctacagcaccagtcttgcagctccataaatacctgcgtcatttcccagtgttgccagtcctaattttgccttgttttcagagattggggtaaaatgatcataatccttctggatcatatcgatcaggaactgtcctgcctttgaaacgccgcctccgataacgaaaatctcaggatcaacggtcagagctacctgtgccagtgcaagtcccagataatggctgactgtcttcataacttccagagccatctcatctcctgcttttgcagcgtccaacacatccttagcacttacattatccccaaattcacgaagggcagaaggcttgtcagattttgccatggtccttctggcttctcttgcaattccagttgcggaacttacctgctctaagcagcctacaccgccgcagttacagtgttcccactcatcatcccgtacatggatgtgaccgatctcaccgccaaggccatgttttcctgcaatgatcttctgatccaggatcacgccgccgccaacaccggttcccagtgtgaccatgaccaggtcagagtagccttttccgcctccctgccacatttcgccaagggcagctacattggcatcatttccgctctttacaggaattccatctaaaaggcggcttaactcttcctgtgggtttaagtcgcgccatcccagattgacacatacttccacgtatccatctggcataacaggtcccggaacgcccattccggctcctgcaacatctttcttcagatccagtcccttttcatccagttttttccggatggatgcagctacatccggaagaatgttcacaccgccgtcttctttgcgggtctttacctcccatttgtccagtaattctcctgttgtctcaaaaagaccaatctttacactggttcctcctatatcaacaccgatgcatttcatccccatggtatatatcctctctttcttttattttaccgtaaacttacgccccacgcatttgcgctctactgcctgctgtcgcaggcggttcgttcgttaatggtctacttttactttaaccggatctcttccattttctgtgttcccaacacaagaagagttccagggaaacgtccggacaatacttttgtcactgtaaaatcaaaacttccgctgaatttttccgttcccgccatgttgtaaacacagcaggaattatcattatacagtgtgaccagatctccatctatatcaaatcctgtatactggtaactgaacgtagtctcaaaaacctggctgccatcagggcggtagacccgaagacaatatggatccgcaccttccccgttgtccgttatcacacctgcatacttgtcagtatagctgatgctgcgcacattttcatctaacaggatctgattgacagattccggagaagtttccactctggtggagaaaaactgcagccccttgtctgtaaagatcactgcatggctttcatccataaaacggactctgccggccatagcatcgctcagatcttccggaaggaaaactccaaccactcgcttaggatcattttttccaagaccaaagttataaaatacaatcttgtttttgatcattccctgatccagatacataaaagaagtgatccactgggtgcctcccggtgaaaggcttacatccaccggatatccatctcctgaaagaagggattttacataaatatccagagcgcttccgtcttttttataaagataaatataacttgctttggagtcttcctgtacagaggctaccactccttttgcagatacagataaggacaaaataggcagcgctgtggttgcctgaccctggcagccgcttctgtcgcagatataaatggaatttccctgtttgtccccaatggcagcaaattcgccgttgacagaaacaaagggggatttcatttcataactctggatccagatggtctttcccctgccatcaatataagaagctccgtctttggtgtatttgatcaccccatcaccaaagtctacatactcgcagaaacttccctctccttttactgctgcttcctgattttcctctgccaggctcttctcccacacgacctgataatcgtaaaaggaatgataacggtcataataataaataccaaaagcagcacctcctaagagcactgccacaactgccagaacagccagtcgcttcctgactgtctttttatgagcattgcggatcgcctgttcactttcctcttccgtctgatacctgggaggaacgatctgacgccgcaattgtctttttttattttcacggttcattaaactggaattatccatccttgtctcctgtgaaatgttcttttcttcatactcgcttaagtatacaacatttcacaggaaaaatcgacagccaatccttgcaaaacaaaaaatctccgtcctgatatatcttaaggaagaagcagcttctgacctgcataaatactgttttcatctgtcagggaattgatctggcagatctcctgaagttttctgatattgtggtattccttaaaacagatcccgtacagcgtttccccttctcctactacatatactttgtaagaagcctctgcattggctgcctgggcctgggtggtctgggcggcagtcgtctgtgccggttctgatgttgtctggactggtggcactgtctgatccggcgtttccttggttaaagaagcttccactgtccctgcagtagatccccctggtgccattgtctccggaattacctccactggcgtttccccggttgtcctgtttcccgcaacagaagaaagatttcccctggcttcacggatcactgcttccggatctacagaagccaccacctgttccatttcatgaagccgtttataattattaaacatggctacaccgcctgccagcaccatgactgccagcacactgcaaagcccggaaagtacactgaccgcacttctctggcgcacagccgctgttttatgctcgtccattttctttctgaaatcccggatcgcccggtcatcggtcttgctttcttcccgcaggatatctttccttgcgatcatataatcctgcatcatctggttgcgctcatagtaaatactgtatccacgcagctggtaaaaaccatcggaagaggtaatataaatagcttcttccccgtccagtccactgtttaaatacatcagctggtttttccctgtaaaatactggctgtgctgcctccagtaatttaaagggcttaaggtaaccccttctccggcgcacaaaaaccagccctgaactgttcttcgtgggaacatggtctctacctgctggtatgcctttttccacgcttcctctgtaaagaccaccttttccccttcctgggaaaggatctccatttccattgctccatctacaaacacatagggcatgtcctcatggatctcccggttgccaaagagcagtcctaccctcaggttctggcctgccgtaggctttaaccgttttaaatatgtatttacataatcttccacataaagccgcagcactgtatcgcgttccccgatctgccggatgttctttggcagtttgggataaagttcatataattcgcccatattttaacaccccttttgctgttcttatctgtttacgttctcacctaagagtagcaaaaggaatgcaaaaattttgtcatattatggctgtattttcccaaaatcgttcgacaagggtaatgctttcgcaaatgcagtctgccattttcattaccatggaaagacgcacactttgtaacatcaccggatcatggcttccgggacctcccacgatccctgttatggaaatgtctcctacttccatcagttctttggaaactcccagccccggttgaagagcgcctttccccaatgttgcaaatccaacgtgatccggacttcccacagaagcatctatggccacgatcacatgatccggaaaatgagtacggatataagctgcataaacttccaggttcatagcatggaccggtttgtctaacgtcccgatcacagctgctttttttaatctgcattttcgcagcttatgacctaccaaaggccccagactgtctcctgtggaacggtccgttccaatacagagaaatatcactccggccttctgtttttccgccattgcctctgcgatcagctggtttaaatttacggcaaaccgctccgcttcaaactctcccattgtatcataataagaaatctcgttccttcgttgtacccgaaaagacttccacaatctcattgccaagttctccaccccggtatctgtttactataaatgataaatactttacctgttatcctgtaactggtttcgtttttatagtataggcggggaaagttggttttattcttttcagatacaaaaaagagccttccattgcggaaagcccttttctcatcctgaatttgatcaatcaaataatttctctttataaactccggcatcgatcagacccttgattgcgtctacaactgcctgcttgtcctctttgtaagtaacaccaaaccacttatctggtgtatccagaacgcggacttttgccttgccttcatgtactaatttgtcgatgatctttggaagcaggtattctgccttgatatcacctggctttaagctgtctaagaattccgggaagcccttttccagctcatttaagaagcttactggaagtccccacatattcatggaaacaagctgctctggctgaacctttacaggatttcctgcttcgtcagctgcgtgaagtccatcttctatcatacggatatcataagtctcagttactttctttaagataccgttttcctcttcgcaaacgcctctggtaacagcgccgttgtcgctgagggtattctttaaaatgaaaccgcccatgcagatgtcatatacatcgccatcttctgtcatttcatttaccatatattcatggatcttgcggaagccttcttttccgtagtaatcatctgcattgattaccaggaatgggcagtcgatcagtccctttaccataagaactgcctggccggttccccatggtttagtacgtccttctgttacttcatatccttctggaagagcatttaattcctggtatgcatagataacagggatctgcttttcgatcctgtttccgatgatctccttaaagtctttctccagatccttacggataataaatactactttattaaatccggcttcgatagcgtcatgaatggaataatccatgatgatctcaccacttggtcctacaggcgccagctgcttaatgccgccgccgaaacggctgccaataccagctgccatgatcactaatgcggtctctttcataattcttctccttgatttctaaatatagttcagtcactcgccaaactataagtgtttgtatcggttacactataacacactttccagtaaaaggcaaaatgttctctcggaatctttctgtgcctgattttgtgagaagatttcttgtcagttgtgcccaaatttctgagacgtatgcggtgcgtacgttgatgaaattcgggtgcgactggcggaaaatcagccacaaaagcaggtgcaggaaagactccgagagaacataagaggataaaggggaattttaatggatttctatccaaacaatacgttttctgccagttttgttaaaaccttctgcactctgcacacatcttcataaggaacaaactcatttggtttgtgcgccagctccagacttcccggtccataagacatacagttatggttcattaatgttcctgcgatcactgctgtgtcggtatagccattaaaggaacctaccactgcttcctctcctgttgtctgctttactgctgcctttaaatttgctaaaagcttagaatgatcatctttttccacataaggcctgtcaccggtaatgatataacttccctttactcccggtatctcttcctctgctttcctgattgcacggtctacaatggctttggctgccgctgtatctgtaggcggcaccagacgcatatcgatccatactttcgcgctgtccggcactacataaggacggtagccgcctgtgatctgaccgaaagtaacagtagaaattcccaggtcatgatgcttcgggcatgccttgatctcttttctgatactgctgatggcttctgccatggctgcaatggcatcggctcccttccatggattgcttgcatgggcggtaattcctgttatggtcagttcaaaccaggttcttcccttgtgagccacctggatctgtccgtctgtaggctccgtatccaggatccagtcatcttttgtgacccagccggccttaatagcagcttctacgccacgcataaagtcctcttcatctacagagcagatcatggaaaatggcttctccggaagttcgcccctttctcccactttctttaccatgtttttaaaggcagttaaagcgcaggcaagaccggatttcatatcgcaggctccgcggccatacatttttccgtcacgtaccatagcacctaatggggaaatatcttcatcccagccatcacccagcataaccgtatccatatggcagatataaataagtcccggtccctctgtttttccagggatctttgccattacattataacgtccaggcagaacttccagacgacttacatggatctggtctgccagcttacctccaaagtctgtgatctgctttttaaaccagtctgtgatccacagaccgatctcctcttcataggctcccgggtctgagctgtcgatctgcaccagctgttttgccagttcccaggcttcctgttcttctctttccatagtatttatcttctccttcctgaatgactcatacctgcgcgctcccgcgtatcacagtcattttattgtggcaatgttagtaaaaaaggtgattgcacttgtagctttaccctactattataagagagggttaagaatatgaaaagcccacttaataaaattaagaaatatgatcaaggagcatttaagtcattatgatgatgaaagaaataaaaagtccattttggcgtaccatttatgaatatggattaattaccgtcagcatctggatcatggtagtaggaatttatttcttcaaattcccaaaccacttcgcatttggcggaattaccggtttttccactgtagtcagccagcttacacactggtccgccagtgattttacatctgttaccaatacagcccttctgctgttaggatttttattcctgggcaaaggctttggattaaagactgtatacgcaaccatggtcatgtcagtaagcttatcacttcttgagcgtttctgcccattaagtgcaccgctcaccagccagccgctcttagagctgatgtttgccattttccttccggctgtaggaaccgcgatcctctttaatattggagcatccagcggcggcaccgacatcattgccatgatcttaaagaaatattccagcatgaacatcggtaccgtgctgatgttagtagacattgcatccgttgttgcttcctactttatcttcggagtagagaccggcctgttctccaccatcggtcttgcagcaaaatcactggtgatcgatgatgtaattgaaaatatcaatctttgcaaatgtttcaacatcatctgtgatgatccaaaaccaatctgcgatttcattatcaatggtttaaaccgcagtgctactgtataccacgcagaaggcgctttcacccatcacgataagaccgttatcatgaccaccatgaaacgcagccaggcattaaaacttcgcaattacataaaacgtgtagagccaactgcatttatgctgatctccaattccagcgagatcatcggaaaaggcttccttgcaaattaagcctcttctgtattcagttcctttgccactttttcaaggtctgcccttatggataatccctgaggacaggctttttcgcatgccccgcactttttgcaaaggtcagcagatgcatcctggaccttctgttctgcgtatgctttcttcgctttttcttcctcatcaaacatggcacagttattccagatggaaaacatttccggaatgtttaccccaaatggacatggcatacagtaacggcaggaagtacagccatttttcacccggctgcggatcaggtctgctgccttctcaactgcttcctcttccgcttctgtcagcggctgaaattttccaaatgtttccagattatcttctaactgttccatagaggacattccgcttaagatcacttttacattttcatggcttcctacccagcgcagagcccaggaagcagcagaacggtccggatctgcctcatttaaggcttcttttgcctcttccggcaggtttgccagacggccgccctttacaggttccatgatcaccataggaacgcccatttttgctgcaagctcatagcctttatccccggcctgtacctgggtgtcaatataattatactggatctggcagaaatcccactgacggtaagtaaggatctctctgaataccgggtatgtatcgtggaaagaaaagcccagatgacggatctttccgcttgccttcttcgcttctgcccattcaatgatcccttcttttaccagtttttcccatctgccggcatctaaggcatgaagcaggtaatagtcaatgtatttggtctggagcctggataactgctccttaaacagtctttccgcatcttccacagaattcaccagccataccggcagttttgttgccagataaaagctgtttcgcggatattttttcagggctctgcctaaaaatggctcgctttctcccttatgataaggataggccgtatcaatataattgatgcctgcatttaatgctcttccgatcattgcctctgcctgcgcctcatcaatggtcccgtcctcatttaaagggaaacgcatacatcccagtcccaaaagggatacattctcctctcctccaataaagcgcatggttctgtacttcattctttttcctcctcctgttattttgagctgttcttaactgtttttcttcttacattttacagctgcctgctttctttattatagcaaattatctgccgtattactattagattactgtcagataaaatccccgccattgtagccattttggatttatgttatactataagaagcgcgtcagcatgtgtttgtggatcaatttatcacacactaaccgaaaaagagagggaaacactatggatctgaaactacaggtcaaacagtcacaggtcttgtcacaacgtatgatccagtctgctgagatccttcagatgacatcacaggaattaaatacctacataaatgatcttgcactggaaaatccggtgatcgacattgtagaaccggctgccggggacagccagaaagagtctattgaacagcagcagtggctgaattcttttaatgaggaaaactattatttatatcagcgtcagaataatgatgacgactacgattttaaagacacctggaacattaatacagacgaaggggaaacattagctgactatctatggtcccagctgatcagtgaagatttttccgaacaggaaaccgagatcatccacttctgtctggacagtctggataaccggggatacctgacggaaacacaggaagacattgccgcttattttaaaacggatacagaaaccatcgaccgtattttagaagagttaaaatccttagatcctgcaggggtctgtgcctttaacctggaagaatgtctaaagcttcagttagaacgtaaaaaaatgctcacacctgttatggagtccctgatcgacaatcacctggatatggtagcgaaaaaccagatcccggccattgccagagccctccatctttcttccggggaagcagccggttactgccagatcatcaaatccttaaatccaaaaccgggagtatctttcagcagccgtgaccagctgcgctatatcataccggatgtgaccattgtaaagttcaaggaccattttgacattttattaaatgagtccatgtacccgggcattgaagtcaacagctactaccgccagatgaaccaggcacctgactcccaggaattaaaagaataccttggaaataagatccgccaggccgaatgggtcaaacagtgcatcacccagcgcagtaagaccatgatggacgtatccagagtgatcttagagcgccaggaagcatttttctcccatggtcctaattatttaaaaccactgcgtatgacagatatcgcggaaatcttagggatccatgagtccactgtcagccgtgcagtaagcaagaaatatctccagtgctcctggggcgtatatcccatgaatttcttcttttccagaaatgtgggaacttcaacttcatcgacagagaagtccgacgatccttccaaagcagtgacagcccgtaagatcaaacagctgctccatgagatcattgctgaggaaaataaaaagaagccttacagcgaccgccttcttggagaaaagctgacggaaaaggggatctccatctcccgccgcaccgttgcaaaataccgggaagaagaaggaattcccgatgccagcggccggaaagaatatacctgatatagccctctgaaaaagtttttaaaaaagtttttaaaaatgcttgacattttttctaaaaaaaggtatgatatcaccgttgtcggtaatacaaatcattgctgaccgggatgcccagatagctcagttggtagagcagaggactgaaaatcctcgtgtcgttggttcgattccgactttgggcactgtgcaggtgtagttcaatggtagaacactagccttccaagctagatacgtgggttcgattcccatcacctgctttgaaaattaaatattttcaattatgcgcgagtggctcaggggtggagtaccaccttgccaaggtgggggccgcgggttcgaatcccgtctcgcgctcgctaaagtgtgagggaatcctagtaaatactggggttttctttttttatcttgtcttatctttgaagacatccagaagacacctattgaactttccccaaggctctggacatcaggttataggtttctttttccgataacggattataaatataacttagtgtagtgcttaaatttgcatgacctaacagctcacgaatagaatctaacggaacctcaccgacattgagacgacttgcaaccgtttttcttaccttatgcgacctcttaatcataattcccagttttgtacatgctttttcaagaatataattaatctggcgtgaagtgatccgggaaccgttccgggtaaagatataatcatcatcagatacattataagccattttaagacggatatgatttaaaatagcaatcgcattaggaactaaatttatagaccggtctgtatatgtcttagtatgctctgaaacggtataaacatctttccaggtatcaccaacacggacagactctttaacctcttccctacaaatatgtaaatgccgtagattttcaacatcacaccacttgagagctaccaactcagcaacacggcatccaataaaaaaatcaaatttaacagccaataaagcaaggtcttctgtagctgtatattctgcatctagatattgcataagtgctttgtattcgtctgtctgatatgtttcagtcttaccactctttttattgacctgacgaaatttaacagtgattttaatactgggcatggggtttgtattaatatatcctttttcaaaggcatagtcaaacatacctaaaagaattgtttttacattctgccattctttggaagaaaggttattaacttttattaactgattacattctttctgcaattccagacgatcataggaagataccttatttggggaaatatcctgaaaatactttttccagtgttgttcatgtctgcgaatcgtattcatactatttgtgatacattccttataagctaaccattcgagaaagagcttgtccatggtcataccagaaacaccattttgaacaaaataggcagtatataatttgtccattagtttttcctttgaagaagcccttataatcttacgcttatcaccttcctttacatatgtctgccaacggccaccagtttttgacggtgctgtaatagcataggggtgtacatctaaaaccatattcaatttatacatttgtacattttgcaatgccctgccgttacataccatatcaaaaaataacctcatcagcaattaatataaatctgaaaagaccatatcagtcataaaatctaaattatcaaccatagcaattttacaaaagccatctggatgaacgaaatcccattctaaaaggtcagattccactttattgaagcggtacagcagttcagatttttttaagcccttactacagtaataaagtcgttgccccaatgccatagaagacaaatctttagtcacatattttgtaatatacttacttacagcctcatgtgatttaagggggcttaaactgcaataaccgaactttttagaatataaagaaaaatccaaatacccgtttttattaactacaagatgtttggggagaatccccgaaataaggccgtgcatatgccaagcgccgtctttatgctgttcaggaatcagcaaataaaaaatcttagaatgatagtttgtgttatagttgttaataaactttccaagcgctttaacataagaatttaaactatatctatcaaatttgtctgggctaatagtcagtgttataaaatagtcccatgaattgcaaaaggcatattcaaatatcagagatttagcacggcttatattgttagatagtttttcagtgtttacctggggaatatcattttctttatcatcagcggaatcatcaaaaggctgaaaaccttttttgcggacagccttagaccagataactttgtacttagaaccaaactgttttacagacagcaccccaacgtcaaaaatttgcgacggggaaacaataaaatcagccataaagacaccttagtttgtgaaaaacaagtaataatcgatacttagtcaagtatagaaggaggcccccgggccagtaaggaaagctgctgcgcgccccgacctaaagtctgggggcgcttgccaacgcaagcggaacagcca

SEQ ID NO: 3564 - DNA, 515 bp, Unknown
  gut microbiota DNA sequence
ttccggagctggcggttgaatccttcaatggcatttgtggtataaatcagccgtcttactgcctccggatatttgaaataagtggacagggttgcccaattatcatgccaggatttatagatttttgggtacttggaatcccatttatccttgaacagttccagttcatttaaagcggtttcttccgtcggagctgcatatacaagcttcagatcagccatcagttttttgatgtctttgtatgaaacaaacttcgttgaattacggatctgatggatgatacactgctgaatctctgtttttggataaacagcctcgattgcctgtggaaatccatttaaaccatcaacgcatgcaatcaggatatcctcaacgcctctgttttttaatccattcatgatagaaagccagaactttgcactttcgttttctccaacatacattccaagaacatcttttttcccattcatatcgataccaagggcaatgtaaaccgcacgttttacaatacgtcc

SEQ ID NO: 3565 - DNA, 45486 bp, Unknown
  gut microbiota DNA sequence
ggtgttttgataaatttgactgtcaaagatgggattgtattatgattatgaagtaaagtcaagaatctgtgtcagcaattcgtcagctacctgctctttactcatcttcggcagttccttttcactgtcttttgtgataatggtcactacattggtgtcagtaccgaaacctgcgccttctacctttaagttgttggcaacgatcatatccaggttctttcgggcaagtttggctctggaattttccagcatgtcccttgtttccatggagaaaccgcataagaactgtcccggtgttctgtgctgtcccagccagccaaggatatctttggtccgctctagggcaatggacatatccccgtctgttttcttgatcttgtcctggcccactacagccggacggtaatctgctactgctgctgccttgataataatatcctgttccggtgctgcaccggtcactgcctggaacatatcttctgcactttcaataggaactacctttacaaacataggtggcttgatcgctacaggcccggttaccaaagttacctctgcccctctgtaagctgctgcctttgcaatggcataacccatttttcccgtagaatgattggtgatatagcgaaccggatcaatggcttccctggtaggtcccgcagtgatgagaactttctttcctgccatatctttcgggtatcctaccgtgcgcaggatatattcaaacaatgtttccggctccggcatcttgcctgctcctgtatcgccgcaggccaaatatccgcttgcaggacggatcacttccattccgtagtgctccaaaatctttaaattatcctgagtaataggattttcatacatacgtgtattcatggccggtgagatgatctttggacaggtacaggccataaacgtagtggtcagcatatcatctgcaatgccatgagccagtttgccgatcacattggctgaagcaggggctaccataaaaacatctgcttcttttgccaaagatacatgttccacgctgaactggaaattccggtcaaaagtgtcgatcaggcacttatttcccgtcagtgtttcaaaggtaatgggattaatgaaattagtagcattctgtgtcataagtacatgtactttcgctcctgcttttaccagggcacttgccagataggcgatcttatatgcggcaatgctgccggtcactccaaggagtattgtttttccttttaacataagggttcctccggttgtgtttcttatttttgtgtgatacaatcataacacacatttcaagtatttgaaaggagttccccctcatgattttagccattgatatgggcaataccaacatcgtactgggtggtattgacgaaaagcagacctatttcatcgaacgtgtgaccacagatcagggccgcacagacaccgagtacgccattcactttaaaaacatcctggaaatgcaccacatccagttatctgacatagaaggcgccattctttcttctgttgttccgcctttaaacactacgatcttaaatgccgtagaaaaggcagtaggcatccgccctctgttagttggctccggtatgaaaaccggcatgaacatccttatggacaaccctaaaagcgtaggaagtgacatgatcgtagatgtagtagctgctatccatgaacatcctcttccattggtggtgatcgacatgggaactgctactaccttaagtgttgctgataaaaagggcaattacataggcggcgtcattttaccaggactgcgtgtttccttaaactccttaagcggaaaaacggcccagcttccttacatcagcctggaagtgccaaataaggtcattggaaagaacaccatcgactgtatgagagccggtattgttttcagcaatgtagacatgatcgacggtatcttagaccgtatggaaaaagaactgggagaaacacctactgtgatcgcaaccggcggtctggcccgttttatcacccctctttgcagacatgagatcatctttgatgatgcgctgctgcttaaaggacttctgatcctttaccggaagaatacccaataaaacaattcaggagcggtatttctgccgctcctgaaataattttaatttatttatttttgtgattgaattctccccgcacctgtgttatgctgggtacatctgatcattcttttacaagatcttcgttcccctatggattacatttcttacaaggttcatatcccttggcgatcacttcatccctggttcctgtaaactcatctttgtttgccgcttttatctgtgacgcagcggaacagcccggtttatggaatttctttgaattagtattcaggatatacgtggaagtctcttttgctggtgcctgagtgttttcagcctgagtctgtttttctgcctggatctctgtctccactactgtttttgtttccttcgcagcagcctgctgatttcccgtaccattttcatctaaccagctgtcaccggtagcataatcaatcgttactcccggctgcgcattatagacaaatacgcagaactcaacgccttctcctttatcctctactgactctgcctccataagcacacctgctgctaccaggttattaccctcaaaaacaggggtcacacggtataaaacatggttttctgtttcttttacatagtcggctgtcatattttcaaaaggcagcattccctggacatttaagtatctggttcctgtgatcaggtttttctcatttgcattttccgctgtcagctggtatccgatcagatggcaccggttatacaggtatttgccatctacaaagtcatattttactgtatgccagcccgttggctttacctgaccgatatttccacgtttctctgtaggcatggtatccgttcctacagaagcatatgccacactgcaccgtcccaacgcatccagatccccataactttcaaaagaaacatcggtcagatctgcgtcggaaaagaagggaacattgttattaactgcaacatacggctgtcccgaataagccgggatcgcagacagatcaaatgccccgctgtttccagtctgggcagctgccgcctttggtgtctggactgcttctacagtcacgctttctgtaactgcctctgttgtctcttttacagctgcggacgtccccgtagcaggtgcctgtccacaggcgccaactaaaagggacacagacattgccagtcccaatacccaatatttcatttttctcatctttcgtacctctcttctgttatcttttcatgggaagaacctggaaattccactgtttccaccagtttccatccggacagatccatagcaaaatactgatctgcaggatatacccggttccatttgtacaggatcactgaatcaacctgggttgtatcaggaaacatgtctttgccacagggatctgactctgcaaaacaatattctccttttgcagcctttttaagaaagtcttcatccactataaggcactttcgtacctgttcgatttcatctttctcaaacatttttgcgctgtacccattcatccacagttttgcatctcccactctgtccagaatatgccgacgaagcacccggtcctggctctggcggcgatggttaaacatcatgcccttgttgtcatccacacacacgatcaggatcatacgactttacaccccgtttctgttttatatcctctcggaatttttcattttcgcacacactcttatattataattgtttcttctgatccacgcaatttctttttccaggtataaaatcccctcatttcgtgcatcattccgttataacggcgtttttcatcgaagctatcataacggaggtagacacaatatgtccggctataaagttgagatctgcggagtgaatacagcaaagctgccgcttcttagcagcaaagaaaaagaagaattgtttgagaagatactaaaaggggataaagatgcaagggaacgctacattaaaggaaacctgcggctggtgctaagtgtgatccagcgtttttccggcagtcaggagaatttagatgatctgttccagatcggatgtatcggcctgatcaaagccattgacaattttgatattacacagaatgttaaattttccacttatgccgtaccaatgatcttaggggaggtgagaaggtatctgcgggataataatgccatccgggtcagccgctccctgcgtgatactgcttacaaggcgctctgtgccagggaacagcttacaagacttcacgcaaaagagccaacgatcatggagatcgcacaggagatcggcatctccggggaagatatcacctatgccttagatgccatccagacaccggtcagtctctatgaaccggttttcacagacggcggtgatcctctttatgttatggatcagatcagcgataagaaaaaccgggaagaaaactgggtggaagacctttctcttttagaagccatgaaacggcttccggaccgggaacgccacattatcgacatgcgtttttttgaaggtaaaacacagacagaggtggcacaggagatccacatcagccaggcccaggtctcaaggcttgaaaaaaatgccctgcgttccatgcgtacctatctggcctgatctgtgatttctcctgctgccacctctgtccccaaaccggacctgatgatcagagtctatgctttatactgccgggaagccttgaaatcaggcttccttctcttctgaatttttcaacatccttaaaataaaatccacagagccctcaattccataagcagaactgttgatacacaggtcatagttatctgcattgccccatctgcgacctgtgtagaaccggtaataactctcatgctggcggtctaactgccgcagcatgtgctttgctttcttttcattaaaatccggatgcatttccattgcacgctgcacacgccgctcaaaaggtgctgtaataaaaatgctgatatgaggaatatggttgttggtaaggatcacatcggcgcaacgtcccataacgataaaatcctctttttttgccatatcacagatcagatcactctggttaaagaatacagcatcccgtttggataaaccatggtaacggctgaactgtcttgcatgatctcttaaggtcatcctctttggtgctgcaaaagccacttccaggtttgccttatccggatatgcactgctgtccttaatcctttcatcctgttctgcctgaagacgttttaaaacagcggagaagatctctgcatcatagtaattgatcttcaatttatccgccagcataaaaccgatctcattaccgccgcagccataagtacggctgatgcagatgatccggtgattgtccttaccaaaacgtgccttaaactgcagtgcatttaagcctgctgctttcgcatccaggatatccccacttgcaaaactggtaggaagcgctattacttcctttaaaatacggttatattccgtcatgatcatggaccgggttcccttatcttcaatggtacgggccatattgctgatcagtgccagttcacttcgcagctgatgagagtcttttcttaacatcagctgtaccatatcactgacacagccttcacggtcacggttgaaaacacggcccagagaagaacctaactgggcataaacttccgcatccagatcgtatatactctccgctaattcctggagattttccttggtatattccatgatacgttcccctccttataaaaagaatacaagcatgtccagtaaaaagaccggaaccagaaatgcaatggaccacatcagatagccgaagaaagaaggcatcttgataccgttttcgtcggagatcgcttttaccataaagtttggcgcatttccaatataggtattggcacccataaatacggcaccgcaggaaattgcctccagcattgccaccggtacagttccaagaatggtctgcattccctctgtaaatcccagagaacctgctgtcgtaaggaataccagataggtaggtgtattgtccagaaagcttgacaggaaaccggttgcccagaacatctggaacggctctgtgataccaagctctgcaccctttgcctttaagatcataagagccggctgcatagtgatgaaaataccaataaacagcactgctacttccctgatggcgccccaggtaaaatggttcttgcggcggatctctgcatccgtggttttaaaggataagaatgcagctaacaggatgatgactacttcgatcagtgccggataggtaagctttacatccccaaatacaggaatgccttttacagctccgcttgcatctttaaatgctgccattcccggtaaagttccgcttaagataacggcagcaacgatcataaccagaaagatcagattgtgaagtcccaggatatgtacctctgtacctggtttgctgatgtctggttttcttccttctgcaatgtcctttctgtaagccctgcggtccaggaaataaaatacagtcagcaggaccactacgttaaagagcaggataggcagcagatgcaggctccagaaaaacggaactccacgcataaagcccattaacagaggcgggtcgccgatgggtgtaaggcagccgccaatattggagatcaggaaaataaagaataccataatgtggcttcttctctttctccatgcgttcatcttgatcacaggacgcaccattaacatactggcacctgtagttcctacccagctggaaagcatggttcccaaaagcagaagtcctacattgatccttggagaacctgccagatctccttccagggtaatattacctgctacgcagaacaggccaaacagcaatacaataaatgtaagataatcatctataatgcattccagcactttttcagttgcttctcctgcgccaaaaaagattgcaaatggaatgacaaataaaacagaccagaataccactgcatgaggctggtggctttcccaccattctgcctttacaagaggcataatggctacacacagcaaaagacctgcaaaaggaatacagaacacaggtgaaatgatctgcgttccttcctgtccggctaacgctgtcagtggaaatgccataaccataagcagtatggcttccagcaacgaaaccaacttcttcaaaataatctcctcctttgtatttacatttatacattcattcttcgcattgttgaattgtagcactttttaagataaatgcaagaattgatattttattcacgtattttctcatcttgcccctcttctttaagtatgataaactggtactatcatgtttaaaataacatacattttatcgctgacattataattacccacagaaagtgaagaatttaacctatggaactgaatgatcgaagatttgcggtccttattgacgctgacaatgtttcacctaaatatattaaatacattctgaacgaggtttccgatctgggagtggctacttacaagaggatctacggcgactggacagatacagaaaagaaaagctggaaaaatgtactcttagactggtctgtaaacccgatccagcagtacagctatactaccggaaaaaattctacagactctgccatgatcattgacgctatggatatcctctattccggaaatgtagacggtttctgcctggtatccagtgactctgactttacccgtctggcacagcgtttaagagaagcagggatgtttgttatggggatcggtgagcagaaaacgccaaagccgttccgcgctgcctgcgacgcttttaagatcctagagatcatttcttccgaagacacgccggaggatgttgtccctgtaaaagtaagtacagatgagattgaaaaagtcatcaccaaactacttattgaaaacaacagccagaaccagcctgtaaacctggcaaaagtcggaaacttccttaccaaacgcttttccgattttgatgtgcgcaattacggttattccaaactttccacatttttggaaagtttaaacagcaatgatttccatgtggtaaaactacataatggatatttcgtccaggaaaagaccgcttctgttccaaaatcagaaattgaaaaagagatctgccgtctgatcaaaaacaataagggacgtgtggataacttaagcattatccatgaagacttgaaaaaaacatttccttcctttgatgtaaagcagtacggtttcagccgcttatccagctttatccgcagtttcaatacttttaagatcaaagacaatgtggtgcagatgcgttgatccgcctctgcaccacatttttataaaacaactttattactcaaagcggacaatttctttttttaaccgcttcatgatctttttctccagcctggatatgtaggactgggaaatccccatcaggtctgctacttctttctgtgtcatctcttccccgtcttcatttgtaagcccgtagcgcagttccacgatcttgcgctctctaggagccagtcggctgatggctgtatttaacagatttttctcgatctcatcttcgatcccgtgatagatcacatcttcatctgttcctaaaatatcggaaagcagaagctcatttccatcccagtctacatttaaaggctcatcaatggaaacttccagcttggttttattattccgccttaaatacatgaggatctcattttcaatacatcttgacgcataggtagccagttttatgttcttatccggcttaaaggtattgatcgccttgatcagtccaatggtcccaatggagatcaggtcttccactcctacgctggtgttgtcaaatttctttgcaatgtatacaaccaggcggagattatgctcgatcagggcagaacgggctttcccatcctcttctgttcccagcataccgatcatttttccttcttctcttgcatccaaaggtggcggtaaaatgtcagcccctccaatataatgtacttccccctgtcccggcataagaaccgtcctgaacctggaaacagtctttaactgaaaacgatttggtacagccacttttatcatcatgatccattcctcctacacttgcatgccttcatcattcttctgtatcagcacttcatattcgtcacagggagacagacttccttttgtaatggcgatccagggtttcgggatcacaaaactgtctttctccccttctaccttcatttcatcgatccttacagccggaaggatcccgctgcttcctacgcagcggtaaggtacatacataaccccttttacaacaggacagagccgtttcatcagttctgcagttgccacatggaccggaataccgcttgcaggagctgtaagatggtttcctgtatcgatcagtcccctggtctttattttctggccctcataaagcaatgtgacattccgcagatatttctgctccgtttttctgtttcctgtgatccttaaaagatctcctacccagaagcagaaacaaaaagctcctgctgccagaaaaaagcggatggaaaatcttccaggcatccagtttgcaacttcccttcccagactgctctcagaaagcgccagcataacacctcctaagactacggatattagatagatcccgcctactgcccggatcagctctttcctgcttcggatcccataagcagttactgccataaggcttccaactgccacgtaggttccaaacatctgcaaaagcagaggagtctctggaaacacagccaggacacaggcccatacagctcctaaaacggctcctcttatcatatgtttaaggtctgcgcggtaagaaaaaagtcggtttaacatggcaagtaccgccagatccataaacaggttcactgcaaatatgacatctatgtaaactctgtacaccatctttcctggcttttttccacctcctgtgttttcatctgaggtacattataatcattctcaagtgcaaaagctgtcgaagtaagggggagaaatggttgtttttttcgacaaaaaaagacctctcccacaggcttttttcctgtaggaaaggtcttttaaaattctttttgaagttttatatttgtggatccaaattatctcttattctttaagaaatccgggatattgatctgcatctctttgtttgctgccgggcggaaggaaggagtggttctttcctgtgccggagctgctggcttttctgctggctggcttcctgcatttcctgcattgaaagttggagtagcgttgaatttagggatggtatatccggttgtctgctgtgtatttggtgtaaatgtgcggttaaatgctggctgtgccggctttgtaaaggttggagctgcagtttcagttgctgctgcttcgtttgaagcactcttctctgctggctgtgccttatagctgttaagtccgctcataaccttgctgacagaagaagttgcgttatgctcgtccagtccggtagcaataacagtaatgcttgcttcatcctgtgcattttcatcatacatagcaccgaagataatgtttgcatcatcaccagccagttcctgaacatagcttgctgcgtcatttgcttcgatcaggctgatgtcaccggaaatattgatgatcacatggcttgcaccctcaatagtggtctccagaagaggactggatacagcctgcttaacagcctcgatggccttgtcatcaccttttgccttaccaataccgatatgggcaatacccttatcgatcataacagtctggatatctgcaaagtcaaggttgatcagaccaggaacattgatcaggtcggtaataccctgaactgcctgctgaagaacttcatctgctttcttaagagcatccggcatagttgtgcggcggtctacgatctcaagaagacggtcatttggaataacgatcagagtatctactgcctgctttaaacattcaataccatttaacgcattctgcatacgtgcttttgcttcaaaacggaaaggctttgttacaacaccgacagtaaggatacccatatcctttgcgatctttgcaacaacaggagctgcaccagtaccggtaccgccacccataccacaggtaacgaataccatgtcagcgccctttaatgcctgggagatctcctcagagctctcttctgctgccttttcaccaacttccggacgtgcacctgcacctaatcccttggtcagcttctcaccaatctgcatagcggtaggagccttacagaactgcagtgcctgcttatcagtattgataccgataaattcaacacctgcgatattttcatcgatcatgcggtttacagcgttgtttcctgcgccacctacacctactacgataattcttgcagcattctctgactcatttattttaatctctaacaagatacttgtcctccttcttaaaaccctgctcacagaacatgggactgtgttttttctataattaatgtttctgatttctagcctaactaatactatattttattttccagaaaaaatcaaccctgaatttacttttttaagcattgtcaagcgtttaaccgagcgttgtgcttgcacataagcacggttagacagttgactttattttaatttaaaaggaatggtcccgtcatttcccgtatctgaatatccatccagttccagggttccctttttatcctttaattccgggtggtctcttagaatatcatttaaaagagacagttttccgtcaacatctcctccgtctcccagtgttacctccatctggccaatggtaagggaaggttgtcctgaagaaccaaagcggatccggtctacctggatatgatagactgaaagctgctgggtcagatttaagatctcctcgaatattttgggatcttttacaggaagatgctgatacaaaacaatacggccaaattccaggcctgtgatccagggcacacccggaaggcagtccggtgaactttctactataataccatccctgtcaaaatacatgtaactgctcatataagacacatagcctacaatgcttttgtcataaatgatcacctctgccttaaagggaccatgaaaaacgatcttatatttctccacaaaagggatctgtctgtggggctgtgttttatccctgataaaagccaggatcgtattgtttccccaccgtccggaaaacaggatattttcaatctgctccggcgtatagcggttacttcctgacacgcttacttcttttatgcgcagaccaaacaccaggaccgccgcaagcagcagaacagctgcggcgatccctacccatttatagctttttctctctgctcttcttatcatcccgtatcactctccatccagcttatctttcctcccagggcatttatatcccggcagatgtcttcgtatcccctgacaatatggctgcaatcttctatcacagtttttccttctgcccccagggcagccactgctaacgctgccccgcctcttagatccagtgcctttactcttgctccttttaagggatatactcccctgacccaggcatcttttcctttacaggtgatatcggctcccatttttcttaaagctgccgctgttccgaaacggtcctcaaacacctgctcccggatcctgctctctcctttggcacatgcaagaaaagccataaaaggggattgaagatccgtagggaactccggataaggtcctgtgcacacagaaagggcttttggacggtctttcatggaaatatgaagagaaaactcttcttcccgtacatttgctcctgcttttctcaaaagttcaagaggaagtttcagctgttttgtgtttacttcttttaaagaaatatttcccccggctgccataactgccgtactgtaagtcccggccacgatccggtccccttctattttccatacactgtcgtgaagtctttttactccctggaccatcagatgctcggtttccatcccacagatcacagcacccatgccatttaagaaatgacataactggctgatctccggttcttttgccgcattgtggatcactgtcaccccatctgccagaacagctgccaacacggcctgttccgtagcgcctacactgggataggaaagttctatttcacagcccttaagaccgttaaaggcttctgccttatactgtccgtcctcttcttctattatagctcccagtttttcaaggaccatcagatgcagatctaccggtcttgcaccgatcagacagccgccgggaaagctgcaccttccctctttcatccttccaaggagagctcccaaaaggataatggaagaacgcattgcttttacatactttcccggaacctctgtacggtccacaaaagcagcatcgatcaccagacgggaacccgttttctcgcagcggcaccctatctcccttaaaatatctgtcatacaccgggtatcttcaatatccggcacattataaagcactgtagtccctttgtggagcagagccccggccataatggggagtgcgccgttttttgagccctgtacagaaatctccccttccagtggattcatcccataaacctgaattgcagccaaaaaggcacctccgcagaaaatgtgtatctactttgatcatatgccctgatggctgcttatgtgcatggccagctgatttctgacccttatttttccagccggatccggttggatacgcttaaaacaattcccatttccatcatgataaacaacaccgatgtacctccataactgataaaaggaagggtgatacctgtattgggaatggtattggttactacggcaatatttaaaactacctgaatggcaatgtgccccataacacccactactaaaagagctccaaacagatccggtgcattatttgcaatgaccataaaacggaagatcataaataagaacaccagaataatggatatggcgccaaacagccccagttcctcacagatgatagcaaagatcatatcattctgtgactcaggaaggaaacctaacttctggatactctgtcctaagccctgtccgaaaaggccgccggaaccaatggcatataatccctgaagcacctggaaactttttccttccgggtcaagctccggatttagccatgcctcaatacggcggtactggtaaggctgcagcaatttgatctgcatcagcgctttaccgatgggtccggcacctgctaaaatgcccattgctaatgctgccagactgtaaaacggccacttgatcttacatgccacaaacagcatgacaaagccaatacctaccaggatgataccggaactcaagttgttggcagcaaccagtccggcaatcgggagcgtcataaaagtcacgttcctcatatacttccactggttgatcttatcacctttcacggtgatataggacgccagcataatgatcagggcgatctttgcaaactctgtaggctggaaactgaaaggtcccacacccagccatcttctctttccgtttacagctcttcccaccagtgaaactgctatcatcaaagcatatgacagtgcataggaaggaactgctacctttgccagcaaatgataatccagttttgagatcaccagcataatgaaaaatccgattgctgcgatcatcgcctgtctctgcataaaataggcactgtttccattgtatttggagcttaactgcgcagtataagaactggcactgtagatcatgaccagcccaaatacagtaaggaaaataatgatgaaaagaagactgtaatcataaaaatgacggggttttcttttctttccctcctgggcaaccggctgctcataagcctgcccggctcccggataagaagcaggccgtcccggctgtacataacgcacctgctcattgcccctccttacaggaactgcctgctgcgcaggggcggggcggttctttcgccgtttctttcccgccattgtcttttacctcctaaagcgccatgacgcattctttaaagacgcgcccgcgttcttcataatttttaaacatatcccagcttgcgcaggccggacttaacagcacataatctcctgcatctgcatacacagcgcatacctgcaccgcttcttttaagtcctctgcatacatgatctctgtgaaaccatattttttcgcgcaggctgcgatcttatccctggtctttccgatcaggactaaatacttcaccctgccggcaaactcttttgcccactcatcataggtgctgtttttgtcatagccacctgcgatcagaagaacaggccccggcatagctctaagtgcctggatcgccgcatccggattggttcccttggagtcattgtaatagcgcacacctgtacgctcccttacaaattcgatcctgtgctcaaccggtttgaatttccggactgtttcccggatcttttcaaaaggtactcccattaacaggccgatgtaggcagctgccattacattttcataattgtggcgtcctaaaagctgcagttcctttacatttacaaggatctgctcttttgttccgtctgcatagacaatattgtctccatctaagaaaaatccctctttcagacgctcacggctggaaaaccagaatacccgggccttaagaccggaaagaacttcctccggatccgtttcttcagcttctgactcagaaacagtttctgtaacttctgtctctgactgctctggctcttcacctgcagtctcatctggctccctaagatcttctgcaccatctagtccgtcttcccgggccacagcttctgtttctgtatccgctgcatcctctgcaggttccggctcttcgatccggctttctccaaattcccttaaaacaggatcatcataatttaagaccactgcgtcttttgcagtctggttcatggtgatacattctttgatgcggatataattttccatagatccgtgacggtccagatgatccggggtgatatttaagatcgcgcttacatccgggtggaaatccataatagtctccaactggaagctgctcacttccgctacagtcacagactggtctgtcatctctgaaactttggatgtataaggctcgccgatatttcctactacaaaggtttcctcatactgggatcttaagatcgcgcctgtaagagctgttgtagtggtctttccattggttcctgtaatagcagccagttttcccagaccacactgatatgctaactcgatctctcccaaaacagggatccctgcttcatctaccactgccacaaacccactgtttaaaggaattcccggactgatgatacaaagttccacccctaaaagatccgagcgcttgatctcaccaaggacgatccccactttcgcatcttttccgaactttgcccggatctcatctgtatttaacgctgtgttgccgtcataaagcaccacttcgccgcctctttcaagaaccagctttgcagccgcaatgccgctgatgccggttcctgcaaccaataccttgctctggttcatgttgcttttaacctcctgttcttttgatgttctctcggagtttttgctacgcctcttttatcttacagccccaggtaagcgatcatgcacagaagcgctgttacgatagaaaatacagctactacccgtgtttcagaccagccgcacagttcaaaatgatgatggatcggagccattttaaagatacgctttccccctgttttcttaaaataagtaacctggatgataacggaaagcacttctaccaggtagatcagtccaatgatcgggataaacagaggcagacgcatcatataagctgcggaagccacaaaaccgccaagagccagggaacctgtatctcccataaatacctttgccggataaacattaaaaagcagaaagcccagtaagcttcctaccactgctcctgtaataggactgatccccatattttccccgatggctacgatcgtcaggaaagtagctaccagaatggtaacgctggtacagaggccatccagtccgtctgtaaaatttacaccattatctgtaccaagagtgataaaaaacagagctggtacaaataaaataccaagggataagaatttaccattttcaaaaccgcctgtaaaggggatcagcatatcaatgcccacttctccgctgtgcagcagataccaggcaaaaataccggtaatgataaactgaccgatcagtttctggatcggatttaagccttcggaccgtttcatgatgatcttgatataatcatctaaaaatccgatgataccaaatccaacggtcataaacagcaccggaatgatccttggatatgacgggatgtaaaaaacagatgtaatgataatgctagtcaggatgatcaggccacccattgtaggagttccctgcttctttaaatggctctgtggaccgtcatctcttacctgctggccaaatttcagtttgtgaagaaacggtatgataaccgggcacagcagcgcgctgacagcaaatgcgataataatagctaatattgtttcacgaatcataaagcacctcaatctcatatgtatgtcttatttggtaaatagtatacgtcttttttgcagaataatcaacttaaaggtttggaagtatccatgcagggaagaatattttcaaaaagtgttccgatcactggagctgctatggtacctccataatagatcccttccggctcatcaatagtgatcagagcgatcacttttggatcatttgcaggggcaaaacctaaaaaagaagaaatatattttttcctgcttcttggcagtttttcggaagttgcggtcttcccgccaatggaaaatccttccactgctgcctttctcccacttccttctgctactacctgctctaacacatagcgcatggtagcactggtctcttctgacaggatcctttttcccaatggccaggaaaattcccggtaatttttcccatcaggactgactgtccccagagcgaaatgaggcgtgatccgtcttcctccattgacgatagaggcggctgtcgtgatcagctggatgggggtgatctgaaaagactgtccaaaggaaatagtcgccagttctacagggcctatattttctttcttgtgcatgatcgtagctgcctctcccggaagatcaatgcctgttttttgttttaacccgaactgcacaaaatatttataataattatcactgccaagtctctgtcccacatcaataaatacgggattacaggaattcatgactccctgtaaaaaagtttctgctccatgtcctcctgctttatgacaacggatccgccgatcttccactaccctgaaaccaggacagctgaatggatccgtcagcttaactactccttcttccagtcctgcagccgctgttatgatcttaaaagtagaacctggttcataggtatcattgatacaggtattgcgccacatggcatttaaaagctcctgctgttttacagttttatccctttctgccgcctgattgcgcaggctctcgcttcgcaggttctggtccggggtaaaaggatcattcagatcaaactccggcacattgaccatggcatagatctccccattttgcgggttcatcacgatgatggatacttttttcgcgtttttcttctctaatgtctggtatgccagctgctctgcatactgctggatttccatatccagactgatccttagatcatttccagccacaggttcgatccggtcctctgccccgttttccatttccacacctctggcatctgtcattgtaaggatctttccattggttccttttaaataggcatcatactgtacttccagcccgatcactccctggttatcgcccccggtgaaacctaaaactttagaagcaagacttccataaggataataccgtttgtaatcttcatccacctttacgccaggcagttccaatttacgcactgcatcccctgtttccttatctacattggttttaatgatctccctggaacttcgtttctccacctttttttgcactgtttcccggtcgatcccaagaatttcacttaattcgtctgtgactttttccctgtcttttacctggttatagatcacagaaacagtacatactgtccggttatcagcgatcacctttccttttgcgtctaagatccttcctctggccgccttaatggaccgttccctctgatgcagttcaagggccatctggctgtaatgctccgaccggaagatcataagaaaaacaagccgtcccaaaagccccaacactgcgatcgcaatgagaagccacaggacggctatattttttctgtgtttcgttaaatttccaccgctatgatccataacagcctctttcctgctgttttcctaaatatatacggtgtaatttctctttttattcattttggaacctttattcactttgtgactgggaagtttcttcttctgtactgttttctgtactgttttccgaagatccttcctgagagtttcctgcctcactgctgctttcatttgctgaaggcagctgggccccggcctctgtatcaccacccggatcagccgccggcagttccggcgcattaggatctcccggcactgcatccggtataccgcttccgccatctgtatctacatattcatcggtttcatataccttctggctttcctccggctgggactctccgttttcttctgaacctgtttcagatggagctggtgtattaattccctcagatggtgtctgtccatttgcatcctggctctcttccggaagatctccagttggaaatacattcagataaggcagggcttctgacatgatctttgagaagatattgcttgcaaaggagctgtgtgcctgctggtcgcctggcgggaaaccaggtacgtccactactacatatacaaacagctgaggatcatctgcaggtgcaaaacctgcgaaagataccagatagttctttgcggaacgtggctgcttctctgctgtacctgtcttaccgcctacctgatagccagctacctttgctgcgccgccggtaccattttctactgtctggaacatggcttcttttaagaaatcagaggtagactgggatacagtttcacgtaccagaacaggatcttttcgctctactacagacccctgctcatttaagatctggcgtactacatgaggctcatagtaggacccgccgttgatcacagaacaaagagctgctgccatctggatcatggtacagttgtagttctgtccgaacgcattggtagcaagttctgtagggcccattttgtcagcagaataaaccagtcctgctgcatctgcttcaccaggcaggtctactcctgttttctgtcccataccaaagatagtctgatatttggtaaaaatatcacggcccatcatagcaccgatccgcatcatagccacgttacaggactgcataatggactctgtcaggcttaaggaaccgtgaccgcctcttctgtaggccgtacacttaatgtcccagtcacctacgtgaagatatccgccgcagtcaaagtactcatttccctttaaaatcccttcttcaagtcccgcagcaactgtcaggatcttggatggggaacctggctcaaaggtatcgctgacacagaagtttcgccacagctggttccaggcaacctgtttaccataggagataacttcttctctggaatagtggtctaaaacctgatcttctgtaatggtctggtccggattttcacggcgatatacaccaactgcctctttctttccaagagccagcagttcatcttctgtatatccgtctgtatttcttggattatttaagtcaaatgtattgctggttgccattcccaggatctcaccgttattagggttcatggcaatggctgccgttacatggcttcccacactggtctgccattcatcaatgtatttctgaaggatattctgtacatttacgtcaatggtggatacaacggtccgtccatttactgcagactttaccacaccttccagattggcatcttcatccagatagccatactctcttccgtttacaccgatcaggctgtcattataatactgctcaatgccgccggtaccattgctgccgtccccgcttgcaaaaccgatcacattgcaggcagtggaaccatatggatagatccttcggtattcatcctcaaaccatacgccggtaacgcgaaatcttgactgattgtcatcatcgctttttctgtaagcagcatttctctctttctcagtctgttcaaattccgttttctggtcataagaaagctgacggccatttttatagcgcagatacgcctgttttggacgttcctggatcagcccgcgcagttcattcccatcaaagccaaacacatctactaatgcctggatggtaggctctaaataataatccggtttatccatgatctggcttgggtccaggatcagattgtataccttttcactggttgccagataggtgccgtttctgtcaacgatgtcaccgcgcctgtaaggaatagtcctgcttgcatactcctgctgtctctgggacagaacgatcttgttgtaccgctcgctgttttcatttacgatcctgtataaaacaaaaataagagcaaacaaagccagcgagatcaatatgatcgtgatcgccagcttttcctgcatgtatttaacgaatgtccttcgtcgaaataaattttcttttttattatgagcaccgtttttagtgttccgggatgtcttcatattgccttacgtactcactttccgtcttgtcatataaaagaacctggtccttttttgcgtaaaccatacccagttccttggtcgcgatctcatagatctcgtttaaatcaatgctggtattgatgcttgtttccaatgcgtcattttctgtacgcattttttccagcttttcttccatcgcctcgatgttgtgcattctggctgtgatggcagactgaagatgaagataattaacgcaaaggtataaggtacagatcgacgccagggtcagcatgataacatatggcaggtccatgtacatggcacgttcctgatttctgcggatcctgtgctgccgttttacacttcttccaacatcctgccttctctttctttgcagtctttcttctctttcggaaggcgccagcttttctgctccggttccatgaatgtaagaagccataaccttattcctcctttcccgcacgctcaaatacccgaagttttgcgctctttgaacggctgttctcctccagttcttcttttgatggaaggatcggctttcgtgtgatcactttgcccatactcttccttccgcatacgcacaccgggaaatccggtggacagatgcatggattttcattggtacgaaatcttgtttttacgatcctgtcctccaaggagtggaaggtgatgatacttaatcttccctccggatttaaaagacggatcattgtatcgattgaattttccagtacatccagctcatgatttaattcaatacggatagcctggaaggtacgttttgcaggatgtcctcctgtagcacgtacttttgccgggatggctgcttttatgatctcagacagttcaccggtggtctcgatgggcttttctgctctcgcctttacaatgtgctttgcaatgttttttgcaaaattgtcttccccgtaatccctgataatgtggaacagttccatttcactgtatccatttacaatatcagctgctgtggtaggatttctctgatccatacgcatatcaagaggagcatcttccctgtaggtaaatcctctggacgctgtatctaactgataggaggacactcccagatccagataaataccgtctactttttctatatttaactctttcagtacattttcaatattctgataattgcttctgactatggtcaccttatctttaaaaggagccagtctctctcccgccgcacggatagcatctgcatcctggtcaattccaatgagccttccgccgcccaaccgcttacatacctcataggcatgtccgccgccgcctaaggtgccgtctacgtaaatgccacccggctttatattcaggctgcccactgtttcatacagcagtacagacttatgtacaaatccatgttcctccatcaaatacccaagccttccatatgttctgcaatttcttccatatcatcaaaggtgttggcttccatccatttatccttattccagatttcaatgcggcttccaacgcctacaagcactgcgtctttcccgatccctgcaaattctcttaaaacagaggggagaaggatacggccctgcttgtctacttcacaggtggcggcgcttcccaacaggaaacgtgaaaacttacgtcctgcggtgttggtaatcggtaatgcacgaagcttttcttctaatgcagcccattcggaattgtcatacacaaaaaggcagttatccagtcccttcgtgatcacgaattcgtcccctaactgctctctgaacttggaaggaacgatcaggcgccccttcgcatccactgtatgattgtattcacccatgaacatagctatcacctgcttgtacattacatggcaaggcgggatgcagaagaggctccttatacctccacttcatccacgcaacaaccatcctctaccactttgcaccactttctaccacttgtatgtttataatagtacagaaagagggaaatgacaaggattttttacgtttttctttcaaaataacaacaaaaaagctgcagaaatcgtcttctgcagctttgaaattctttagatatttttagatatttttttgcttttttaatttactgtgtttgtagtggaggacacctactgctgctcccactaaagctgcggaaagcagctgggaaactgccagtcctgttcccggaagcttcagctgatccgtacgcaggccttcgatccacactcttcccagaccatatcccaggaaataaacccacagcatttcaccgtcaaatttctttctcttcctataccagagcataaatgccaatacgcacaggttccagcaggactcataaagaaaggtggggtgtacctggatgtattttacaccattttccacgatctcatgttctaacagtccggctgagatcatagacgggtttacaatactttctttaatgcgcatggcaaacaggttatcggtgtatccgccaaatgcctcgcagttaaagaagttgccccagcggccaatgatctgtcctgtgatcagtcctaatacgccgctgtctgccatggaaaagaaggactgtttccgtacttttgtaaaaataagaagggtcagtactgctccgatcacaccgccgtaaatagccagtccgccggcgcgaaggttaaagatctgcagcagatcatttttataattatcccactcaaagatcacatagtagagtctggcaccgataatggaaaaaatgatcccatacagtgcaaaatccatatacagatccgggtcctgtccccgccttttggcatcagagaaaaccaccgccataccggctaacataccgcagccaatgataataccataaaatgcaatgcgaaagccaaagatactgatgctgtttcgcaggtgttctatggtgatcccaagatggacgaaacttaagtccgcacctgtggatgtgagtaattccataatatactgttcctttccgttatttgcagctgccctgttaaatggctatctgcatataaaacaagtgcctgcagagcaggcagtttgttttttactatcgattaattctcaatcattatacattgaaacggaacagtacaacatctccgtccttcatcacatattccttaccttcggaacgtaccagacctttttcctttgctgcgttcatgctgccgcatgccatcaggtcatcatagcttactacttctgcacggatgaaaccacgctcgaaatcgctgtggatctttcctgcagcctgaggagccttggttcccactttgatggtccatgctctggactcctgaggacctgctgttaaatagctcatcagtcctaaaatacggtaacttgctgcgatcagtttctcaagaccagactcttttaagcctaagtcatctaagaacatctgcttctcatcatcatctaactctgcgatctcctgttcgatctcagcacagatcacgaatacttcgcagtcatttgcctttgcatattcccgtacttcctgtacatagtgattggaagcgccatcatctgccaggtcaccttctgctacgtttgcagcaaagataacaggtttccaggtcagcaggttcagggaattgataaattctctgtcatcctcgtcttctacttcaaagctgcgtgccagtttgccgtcttccagatgtgccttgattgcctttaacagttctacttcttttgcaagatccttattattgaaagcacccttggactgctttgcaatacgacgctccaggatctcaatatcagagaagatcagctctaagttgatcgtctcaatatctcttacaggatctacgcttccgtctacatggatgacattaggatcatcgaagcaacgtacaacgtgaacaatcgcatctacttcacggatattggataaaaactggttgcccagaccttcacccttggaagctccctttaccagacctgcgatatctacgaactcgatcactgcaggagtagtcttttcagagttatacatctctgtcagcttatttaaacgctcatctggaaccggtacaacacctacgtttggatcgatcgtacagaacggatagtttgcagactctgcaccagccttggtcagagagttaaaaagtgtactttttcctacgtttggaagtcctacgatacctaatttcatttttgctttacctgctcaaaaacccccggatagatcaaaggttttcgcctttctttgtattctttatgtaccaattatgtaccatttctttaagagtctaatgcaatcattgattatagcataaggatttctctttttcaaggttcaacacgctttcagactgctttttggatctcatttaccaggtcttccagtcttttttcttctccttttcgcattaccacaccaacacttccggctatgatgtgggagggcagcactttcaaaatatgggaataacagttttcccaatggctgtgaaatacaagcagggactcctgaaatttcgcctggaccatggattccagattatattctgtgtgtaggtcctgcattttcgccccggtatcttttagcatttcttcaaaagaggcttccatatattcataggttccacacaggaccctgacatcctttagatcctgtggtctgatcttctttttcctggccagtgcagactcaccattaacgccaaaggcacaggtatctatacagagttcctgatatacaagcaattaattcccaccagaagtaaattcccctggtattcctttaaagcatccacatactgcttctctttgatctgactgatagcgccttttgcgcttttatcccattttaattccatgatcactgccggtttattaaaatgcatttttattattatattgaaggattgaaatctccctgtgggctttatcaattccttctgctactgccttttcatccagattccaaagagcttctaacaatatttttgaagcctcaacagatgcagtcacctcggaccacttcattgtactgatagcattgatgtattcctgggaaacttctttatttgggattgtaactgtcttatccggccagtgatagctgagatatcccagatggatcagtaatgtcagcacatcatcttttccctgaaagtttgtcatatcattggaaaatgttcccgtattgacctgaactctttctcctgcaagcatacggactactgcatctttcaatccatcaaacagcaatagatttgttatcttttcttataaagaaccagttccggagtttccccttctggcccgtatgtgctgatcataatgaaatccatattggcaaggacaccgaaacacctgtcaccgccaaattctgactccagctgattgcccagataggtgatctcatcatttaaaaattttactgtttttccgtttggcagcggatatcccagatttacatagctgcccacaagggcattcagtttttccactttcggtaatccttcaatgtgaagatcattgatctcttttatcaattgttctttaaacgcctcaaattgtccattatcacttaattcttcataccgtttccaataatcaagactggggagcagttgcttcatataagaacgcgcctgttcttctgtgaatttatcatttaccatatgttttacgcagacatcaataagatcatccatattactataggtgtaggttccatcggcatagcaccatttacaatactcttcattcaatgtgccatcaccgttatggcttataatcccatcctctaatggcattccgcagcactgacacacaagctgccttgggtcgcctaaaagggtattgatggacacgtcaaattccttcgataacaactttaaggtctccgtattgggaacggtctccccattttcccagcgtgacaccgcctgccgtgtaaccataaccttttgtgctaactcttcctgagacagcccttttttcgtgcgaagctcaaaaataacattttttgtttccatggtatctacctccgttatatagatcataacagaattacaggctttgggaaagcaacttgctgtttctatagatattgaaagccgctggcagccttttccgaatgtatggcagcaaaaaagcagtccccattgtaaagcaggactgcttagatttttatgttgcatccccggtttctgaggtctgcgcttctttcagtgtcatttttacccggtcgatcacccggtcttccatttttaagatctcgtaatctgcttctggggtggtcactgtaaggggcagcgccttttcagtagggatatatcccagaacttccatgagataaccggacaaggtatcacatacgctgtccatatccaggtggaattcctcttttaaatctgacagtgcaatacttccggaaaggctgtatacatgtcccggctccaattcgatgatctccggttctacttcttcgtattcttcgtggatatcacctacgatcacctcgatcaggtcttccagagtgaccataccggatacgccgccgtattcatcgatcagtatagccagtttttcttttttctgctgcatttccctgaaaagggcatctgtacgcctgttttccggaacgaaataagcaggtgttaaaagggaacggatatccagattttcaaaggacttctttctggcctcaatggtcaatgcctttgtggaaagaataccgatgatattatcaatatcttcctgatataccgggatcttggaatgcatggactgtaaaatatcgtccagataagagtccaccggttcgtcaatgtcaatggctaccatatcctgtctcggtaccatgacttcttttgcttttttatcatcaaatgagaaaatagaagtgatcatctctttctcgatctcattaaatacaccggtctcacttcctgtttccagaagggatttaatctcctcctcagatacatctgtttccagattttcatggtgcataccgaaaagctttaagatcccgctggtagaaatatttaaaaggcctacaaaaggctttacgatacaggatacaaaataaaccaggccaatgcaggataaactaaatttttccgcattctgcaatgccattcgtttggggatcagttccccgaataccagattcacataaacaagaataagggtaatgaccaccactgcagcaatcttactgcctggtattccccatctattcatctttacagccagtattcctgaaattcccgttgctgccacagcgctggaaagaaaacctgccaatgtgacgatcagctggatcgcagataaaaatgctgttgatccttccatcaggcgctcgatcagggctgctttcttatttccctgttcttttaacctgtggatcttgtttttgtttacagaagccacagccatctctgctcctgcaaaataccctcttataagagtaagtaccagcaagataagaagctgtgtgaaaatactggccgattgcggatcggtttccataataaaaaattcctccttttggatgtatgcattttcgcaaattatcatccgtatgattatcatttagactttattatacagacagtcacgaaaaaagtcagcccctattttctcaaaaagggactgacttttttacttttaatatttcttttatcctacagcagcaaactggctgttgtaaatttcagcataaaagccgttctttgcaagaagttcttcatgctttcctttttctacaatatgtccgtcacgcataacaaggatcatatctgcctcacggatcgtagaaagacggtgggctacaataaagctggtccttccttccatcatcttggcaaaggccttctgaacgcggatctctgtacgggtatcgatagaggaagttgcctcatccaggatcagcattggcggcaggcagagcataactctggcaatacacaaaagctgcttctggccctgggacaggtttccgccgtcctcactgatcactgtgtcataaccctgaggcattcgcatgataaagctgtgtgcatgtgcctctttagctgcatttatgatctcttcttctgttgcttctggtcttccgtaggcgatattgtcccggatcgtaccggattttaaccaggtctcctgaagcaccataccatagctggtacgaaggctctttctggtcacatcgcggatgtcctttccttctactttaatagaaccggaatttacatcataaaaacgcataagcaggttgatcacggtagtctttccacagccggtaggtcctacaatggccactctctcaccaggttttacagaaaggttcagatcttcgatcagcggtctgtctggtgtataggagaagtttacatgctcgatctccacctggccctttacattttcaaggactgtggcgtctttcttatcttccagaatggtcttttcattgatcagctcaaatactctggctgcagatgcaagggcgttctgaagctctgttacaacgcctgagatctcgttaaacggctttgtatactggtttgcatagcttaagaaactggtaagctgtccaacagtcataaaaccacggatagctgcataagcgcctgtaataccaactgcagcataaaccaggctgtttacaaaacgggtagccggattggtaatggatgagaagaaggtagcgcgcagactgtagccagccagcttgttattgatcgtctggaaacgctcctctgcttctttctgatagccaaaggcctggactaccttcatatttcccagcatttcatcggtcagtgtggtcagctcacctctggtttcagactgatgtttaaacataacataagtcttttttgcaatgaaacttgccacaaacagagagataggtgttaaaactacaactaccagtgtgatcagcgggttaatggaaaccatgaaaagcagggttcctaaaatagtcatcagtcctgtaaaaaactgggtaaatcccataagcagaccttcggagaactggtcgatatctgcaataatacggctgatgatatcacctgacgggtgggagtcgatataacttaaaggaaggacttccagatgtccgaaagctttggtacggatatcttttacaactctgtaggtgataatgttgttaatatggttcataagccactggctgatggcggtagctgccattgccatgatgatctttttaataatactgatcagtgccgagaaatctacatttccctgacttacgatctcatctactgctttacctgtaagaattgggatataaagggtaaatgcaactgttactaatgctaacagaagggataaacatacggcccatctgtaagcggcaatgtaatcaaggactctttttaatgtttcaatgctcttatccttgctcatttttggctttttactgctcatcccgttccacctcctcttttgacagctgtgacaggcagatctccctgtaaacatcgcattccttcagaagctgtttgtgatttccaatacctgccagttttccatcatccagtaccagaatggtatctgcattgcggatggtggtagctctctgggatacgataaatacagtcatatcctttgtattttcccggatggcccttctcagtcttgcatcggttgcaaagtcaagagcagaagcactgtcgtccatgatcaggatctgcggatcccgtaccagtgctcttgcaatggtaagacgctgacgctgtccaccagataagttatggccgccctggtcgatcatcagatcaagaccttcgcccttggcttcaataaaatctcttgcctgggcaacatccagtgcatgccagatctcttcatcggtagcatcttccttgccccaacgcatattgtcacggagcgttcccttaaagaggacagctctctgaggtactgcaccgatggcatgtcttaattctgtaagaggcagatctcttacatctgctccgtcaataagaacctttccttctcttacatcataaaatcttgggatcaggtttaccaatgtggacttacctgaacctgtaccaccgatgacaccaatggtctgtcccttcattgccttaaaggaaatgtctgtaagggagtcagattttgctcctgcataggcgaaatccacatggtcaaattccacttttgcagtttctgggctgatcttctgtgtagtttccatttcgttttcagtattttgagtttttatctcatgaggtttttcctcaatgctgctcttgatctcaaatacactgtccacacgcttcatgcaggcaactgccttggagatcaggatgatcaggtttgccatcttgatcagttcaaccaggatctgggccatatagtttacaagggcaatgactttaccctgactgatgataccggcatctactcttccggcacctacccagatcacagctacggtagcaatattaatgatcacataagtaacaggatttaacagtgcggagatctttccaacaaatacctgcatctttaccaggctgccgttttcttcttcaaacttctctctctcattttcctggcggttaaaagcgcggatcacgcgcacacccatgagattttctctcgtagtcaagagaactttatccagctgtctctgtacagactggtataatggcatacttatcaacatgataccaaatactaccacgcagagtacaggaatggtcactgcgaataccatcgctgtatgggcatctactgtaaatgccatgaccatggcaccgaatacaacgaatggggaacgtaacagcagacgcagggtcatgttgataccgttctgcacctggttgatgtcgctggtcattcgtgtgatcagggtggaggttcctatggtatcgatctctgtataagataaggtaccaatatgggaaaacaggttatttcgcagtgcagtggctgttcctgttgctgccttggccgcaaagtactgggctgtcagggaacaggtcagtccaatgattgcaaggagcaaaagaagacctcccatacgcaccacataagatacacttccgtttgcaatacctacgtctaccatattggccactaccagaggcacaaacagctcaaagctggcctccagcattttaaacagcggtcccagtatgctctcttttttgtaggcacacatgtaactgagcaatcgcttcataatgcatttctcctatgaaatattgtattttatttaactatctggtattatagcacatgaaaatatatatttaaaatattgatttaatatggaaattatatgtttatcgtataggtattgctatatttttttggaaaagaggtacttttatgaacctgaaacagatggaatattttgtagccattgtaaatgagggaaatatctctgccgctgccaaatctctgcatatctcccagcctcctttaagcgcccagatgaaactgttggaagacgaactgggcgtggtgctttttgagcggggctccaggagtatttttctcacagaggcaggaaaggttttctacgaaaaagctttgcacatcttacatctgactacggctgtttctgatgaactgcagcagatgggtcagggattaaaaggacctctgcatcttggaatgatctcttcagtccagactcccaggttgatccgggcactctcctcttttgtcagtcttcatccggaggtgacccttcgcatcagtgagggaaatacatatgagctgatagatcagctaaattccggtctcattgaagttgcagtggtaaggactccacttcctacagagtcttatcagtgccactttttagaggcagaacctatgatggcagtaggaaagccggaatttttcccggatcctgcagcaaattccatatccgtagcttccctggcttcctgtcctcttattgtctaccgcagatgggaaccttttatcagccactgctttcctggcactgccccggattacctttgtatcaatgacgatgccaggaccagcatgacctgggcccagtgcggcgccggaattgcccttgtgccttcttccatggcaaaagcagggggcgaagacttattaaaaatccccctgaaagatcagggggtcatgagccggatcgcgctgatcgccagaaaacacggcatggtcagccgggtatccagagaatttttccagttttttccaaactactttgcgaactaggatgctatgtgccagtggaacatgttcagcaccgaccgaagcggagcagagatgcgaaagtgcaaagcacgtagcaattccttgagcaaaggagccactacttatatctcatcccagaaccaattaagttccgctcccataaacaatatgcacatacagatataaagccacaaaaatgacaacgcaatggctgcaaggctgccgtacatataagaatagtttttcccgcctgtaaaattaaaatacagggaaaatgcaagagaaaaaagcatccagccggttgtggaaaatacggctcccggcaacgctacttttacgctctccttctggtccggcaccagacagtagattcctaaaaagaaaataagaaggatagctgcgccccacagctggcgcagctggatcacatagccggtaaatggggcgataagaggaaaatggctctggataaaattctggagcgtccgtccaaataccagaaggcccatggacataaggcagacagcaataaagagaatggtataaccgcagcagattaggcggttaaacacataccagtgccttcttcctcttccattgacccggtttaagcctcttgccacgctaaacataccccttcctgcagaccagagagcggttacagctgtagcagagatcatggttgccggggattttaacatcaggtcattgactacacgaaatgccagagatttataatcagccggtacaatatccatggcgatctctaaaaaatccgccttggaaattcccgggatcatctggaccgctgtgagaagcagcatcagaaagggaacaaaagaaaggatcacaaaaaaagagacctgggccgcatacaccgtcatctcatcttctgaaaatttatcgtagatacgttttccaatgagaatgagacgtaccatgggtcaagtcctccttattaaagcaaagtggatcaccgccccctgcggggcggagatgtgtcaacaacagttgtattgcgcccatgtcaaagtctgagtgactgttccccccgcgttgcgggggaacatggggattttatggacatctggctatgtccggctggctgctccccgcgctgccgggaataccggcttttactccaaaaaatgcaggcatcacaatacacatgcctgcattttaacataaatatccttcaagttcaacgccctctccggcgctgcctgtatcccgatcttatatcctaaattcttatccttaaatcctactgtgtaattcccataactgcccatccataagtatcagccgcctgggtaaatgccaggtcagctgccttgtagcttgctgtctgggaaatatagttcatttcttctgtgagatattcttcctggcttaataaaccggcgctgtatttaatatccgcattcttcttctgtccttctgccttccggaacgcagtctgagctgcctgaagctcactttttttcagcaatacattctcataaagctggttcatctgaatagtcaggttctgctccccctcttctacggtagcattccggttattttttgctgctgtagaagttgccttcgtgccacggctgctgatcagggagctgttatttcctatagcctttttcgtatccgcttccagatccatactgtctgcctttgcaaggtctgctgccgggatctcacagatcacaaggccgctgtccgtatcccgtcctaccataaggcagagactgctgtaagtgctgtttaagctctcttccagggaagaaaggctgctcctagcacttaacaactgattttctttttccagcacatcagctgctgtagacattcctgctgcctgttttgttttttccaggtttaaagccttttcatatacttccacctgttttgtcagtgtatccttctgaagacttaaagtctcataagtcatcatcagggactgggctgccactgtcagctggcgggtcatggtccttaaacttttatcactggcttttttcatgctgtcatacatttttttatacatgctggatgcagctttgtaaactgctttttcctggctgtagtaagcataattttccatatcgccatcccttttagcagtttgcagatccgtagacgcgcttgactgtccaaacttcaattcatcccatgcattgacataatcttccaaagactggttaaaactggttaaagactgctcaatagtaggattgtaccgtgagatcagtgtatacagctcactgtattctaactggttatcctgcagctttgtctcatcggtctccacctgccccatccactgggcagtatcagaacctttggtatcctctttttccgcatccgagccgtctgcatttcccacctggatctgggagctgccttccacttcttccggccggtctgcaaattcatctgcataggcagtgatcagccccagccggcccagatcagctccaagttctcccaaagtgcccataacgcctgtaccgacaccagctaacgccacacaaagcgcacctgtccttaaaacctttgccgcctgcagtttccatttttttccatatttatcctttaaaaacatacaagctgcctccttcctactgggctgctgccaggccttttaccgcccatttataattttccactgcgcttaacagactgatctgtgctgtttttactgagttttcactggttttcgcagcccgttcttgggcatcgtaatcatttttagtcatcattcctgctgccatctttaaagctgcattggaaagattggtctgctccaactgtgcttttgtctgggcctgctgtaaagagatctgggctgaaagcacctttttgtaagcgccggataaagatgcgccgatctgcttcttattattggcaatggctgtagtcagctggttctttactgtctcattttttgcgttttccagcttccgctcattgatctttaaggtatagttgttctcgattgcctgtgccaggtctgtatccgggttcatggccgcgatctcattttcatccacatccgtcagacttccgatctccggtgagtcattgtagctccagcctaaaagcacctggaaattctcttttaagttcttgatcgtattttccagctgggtcaagttattttctgctgtctgtacattttcctgggctgtcagcagatctaactgggtaatggtacctgcagaaagctttgtctgtgccagagccagattttcctttgcctctgtaagggttgcctctgcctgctccttctggatcaaattctcataataagagatcatatctgactgggccgtaacaaccaggttcttttctgcctgctcataggtaagaagataaatcctactgtcctccaaagtttcatctccctgcttttgcatattgtctccctggatctgtaaattcaggtccgacatacgggaagaagcatcatcatccccggacatatcgttgtaatagtcctgcgccagcttataatattcctgggccacttcctcattggtatccccatagtcctggcggaatttctggtaagtatactgattattctgcactgtagcgttgtactcatggatcagcccttccagttcatcatattcgatcacattatcccttaattttgcccattcctcttcggtcctggcaaaagagggacttgctgcataggcactgtatacaggcatagtccccgctgccacagccgccacaaaagcggctgccagcacacggctgaatgatctggaaaatgtaccatatgtaccatatttatttttcctcatggtcatccttctttctatcctttgatccattgctatctttattactgatcatcctttttgttcccttttttgctaaatcctgcaaataatccttttattttgttcataatattctctctggtacgtttacgcttctttgccggtgcctcaaggtctcctggtttttccctgccgctcatgaggcggtaatatacaggaagcatcaaaaggcacaggatggtggaagctgtcagaccaccaatatctacaatagcaagactctttgtagtggttccgctaaatgccatagggatcatggaaacaacggttgtcagcgttgtcatcagaataggtcggatacgggtagcgcctgcctcaataagagctgtatcacgattcatggttccccggtactggtttgcagtatccacgaacaaaataccattatttacaacagtaccaatcagcatcaggaaaccgatgagggaaaccatgctgatggaacagtcagtgagccacaacagcccaaatgcaccgatcagactgaacgggatagtggtcatgaccattccggagaacttaatagactcaaactgggctgccattacaacaaagatcaagaatactgcaatagcaagtgccttaaacagggatgcaaactcctcgttcctggactgatccctggaatttaagccaatacttactgtgctggtcagatgaggctttactacttcctcctggatctggtttctggtattctgggtggccttttctgtatattctgcagagatggtcactgtatattccttattttctcttgctacagaagaagggctgtctacgaattttacatctgccacatcagacaaagccacagaaccgccttttccggtggtaagaacaatgccacgtacctggtcaatgctcttatattcgtcctctgcatactgtacttttacatcaatatcttcaccgtttacctggatggtggttgcctttacaccgtcaatacaattgcttactgcagtcgcgatctgggatggggtaagacctgctgactttgcctttaaggcatcaactcttacttctactacaggagatgagttttccacgtcagaatggatctttgtcacatcatcccttgtttttaactcttctacaacggaattggttacttcttttacttcgtcataatccgttccctttaagatcacctcatagctctgtctggtagcagacatcatgctcatggaagaaccggcctctgcggtaatatcgcagtttgtaatatcagaaagctcctgctgccatttagatgccacatctgctgttgccatggtacggtcgtccttcagatagcctgtaactgtagcagaactgccgcctctcctggaacttccataggatgtcatataagaatccaggttttcatcctgactgataatggcttctacctgctttaatatctcatctacctttttcgactgaagtcctggtcttgtatctacagttactgtgatctcaccttcatcatctgcagccatcagctccattttcagggattttccaatgaaaagggctaaaaccagaagggcaatggaagtaagcataactgtctttgacttataaagaagggtactcatcagctttctgtagccttcctgcagcctctttacaggtctggaaaatggcgctgacagcttttctgttggcttataagccatatagcacaggggcacaatggtaatggatgagatcagggatgctgccatacagaatacaattgtaaagcccaatggcttaaacatctgtccggtcataccctgtaaaaatgccagtggcaggaatacaacacaggtagtggctgtaccgccgagtacggactcccataccagactggtaccttctaaggcatcctgcatatattctacaaatccgccccgccgctttgctgtcatacggaaacagctttccagaacaacgatagagttatctaccatcataccaacaccaagtgtcagcgcactcatggtaatggtatttaaggtaaagcccattaaactcattaagatcagtgctgacaaaatggaaataggaatggaagtacctacgatcagggacgcctttaagtcaccaaagaacagccagataatgatcatggagataatgatcgccaggaccagtgtctgggctacatcctttaaagagcttataatactgtctgcatcatcacgtactgtgatgatatgtaagttttcatcggctccttccagatttgcaattgtcttttttactgcattggaaacagaaactgctgtttcactctgctgctttgtaatggaaagagatacggtatcatttccattgtaacgggcgattccgtcattttcctctgttgtagtgtatacatctgccacatcttccaggtaaacggtgcttccgtctgcactggtcagtgggatctcttttaacagatctacggtatcataagtggtacgggtggaaacagaaagctttaagcttcccacctgggtatcaccagaaggataggaaatatctgctgctgcaatatccgctgcaacagaagccatggtcattttatactggcttaatttttccggaatgatctggatcttaatatattcatcagaaccgccgcggacacttacatctgctacctgggcaattttttcaaactccggctggatcttatcttctacataagaatacaggttttcctgggatgtattatcaatagataaagtaacacatggcatggagttcatatccatttccatgatcataggatcgcctgcactgtcaggaagactgttttttaccagatctaccttctttttcaggtcatcatacgcctcgtctgtatctgtgccatattcatattccagcatgaccatggaactgccttcactggaattagatgtaacagatttaagaccgcttaaggttcccacctggtcctcaatgggctttgtaatgatctcatttacgtcctcagggcttgcaccggaataagtggtcatgaccataagtaccggcatttccatatccgggatattttccaggctcatgctggttacagaagtgtagccgaaaacgatcaggcagagcactgccatcaatgtggtaatgggccgtttgaggacaaatcttgttaaaccattcattatgtcgtcctccttactgtgccttgtttcctgtcatgggagctcccggtccgcctggtgcattcccttctggtccacctgcaggtgctccggctgcatcaccggtgctgtcatcctgtgtcgtttccccttttaatcttacctctgctccgtcatacagctcagagctccaggtagtaactaccatgtcatccatagaaagaccggattttacctctaaaatatcggagtcaaaaattccctcttcaataaatttctgccatacttttccgtctgaatatgtatacacataaggttcgccattttcataataaacagcatctaccggaatggtcataactccctctgccttttcagaagttacatacagctttacttcagaaccggtaggaagaaccacatctgcgtccacagaagcctttaccttgtaaagtcctgtagtctcatccgccatggtacttacttcataaaccgtaccttcataagtctgtccgtccttttccacatcaatggtatctccttctttcagatagcctctgatgcgctctgtagtggagaaagataccactctgcttccctgtccggaaataacaaagatcagattgccctgggatacattgtcataattttccacattacagatctctaccagaccttccataggtgctgtgatctggctgtattccagctgtgtttcatagttatattttgcctggtcatagtttatctgggcactggacactgcattctgatactggctgtactgctgatcagaaagtccgccgcctgcatataaaagctgctggcgtgaaagttcttcctgtgcctgacgtaatgttaatgccgctgaatccatggtatttttcgctgattctacctgcttggtatcaatgttgcaaagaacctgtcccttggtcactatatcaccggcctttacatttacctctgttacatcaccggctgcttttggataaatataaaccacatcagaaggctcgatcttaccgatcacactggtggtcagccggatatctcctgtctcaggtttttctgcatccataacaggaagagccactgcctgggcaaattgtttcggtttcgtaaatttaggtacgatgaccgcacacaatgcaataatacagatccctgcaattatgatctttttcttcatcttttctcttatcctttccccacgcagcaaaaaacgctgcttttctcattaacattcttcctaaggataccatttcttaatgaaccctttcttaatcgaagatgaactgaagatgaaatcacatatttttcacatttccattcaggtctttttgaactttctttccttattcttttattttgttcccaatatttcacctgatgttcatgaaaatgtgctatgctgaatatgataatgaggctgatctgaagatgcaggcccaaaataggatcaatctataaaatatataaagaagaaaggcaaagaaactaccatgcagatattgaccattcttgtaatagaagacgaagactccctgctgcagctctaccgcattgtgctggaaaaagaaggttttaaggttttaactgtacacaatggacaggaagcctgggatctgatcgagaacgaacatgtagatctggtgatcaccgatattttaatgcctgttatggacggctatgaatttaccaaactgctgcgccattccaaccccggcatgccggtactgatgatcactgcaaaagatgattttccttctaaaaataagggcttttccctgggaacagacgattatatgacaaaaccggtaaatttagatgaaatggtattgagggtgcgggcactgcttcgccgttcacacattgccagtaataaacggcttactctgcctcatactatcttggattatgatgcactgaccgtaacctggggagatgatccccagatgcttccccagaaggaatttttcctgctatttaagctgatctcctatccaaataagatctttacccgtatgcagttaatggatgagatctgggggcgcaacagtgagtcagacctacagaccattgatgtacatatcaaccggctgcgcagacgttttgagaataatccggattttgagatcataacagtccgtggacttggatataaggcggtgatgaaagaatgaaagatctgaaattatggggtatttttatcagtttgatcattgttgtgcaggcactgggatttttcgtattttccggcattgcctggtgtttattccacgcaggcatattaagtccggatcatccccctatgggctggtttccttttctcaccaacacctgcagttccgcactgatctccctgtgcattaccacagtcatctcccaccactttttccgccctatccaggacctggtccatgctttagaacaggtatctgcaggaaattttgatgtgcggttaaaagaaaatgacatctggtatgaagtcagggagatgaatttaaacttcaataaaatggtgaaggagttaaattccattgaaactttgcagtctgattttatccagaatgtatcccatgagataaaaacccctcttgctgccattgaaggctacgctgcccttctgtctgcttctaccagggatgaacagaataagctgtacgcagaacagatcttaaaaagctcccggcagctttctactcttaccggaaacattttaaaattgtccaaactggaaaaccagtccattatctctgaaaagaaaaccttctctttagatgaacagatccgtcaggcagtcctttccctagagcccatctggtctgccaaaaatattgatattgacctgaatcttccggaaatatctttctatggaaacgaagacctgatctttcagatctggaccaatctgatctccaatggaattaagtttactccatccggcggtcttgtatctgtaaaaatgactgcagaagactcttttgtaaatgtggtcgttgcggacaacggcattggcatgaccgaagaggtgcaaaaacatatttttgacaaattttaccaggcagaaggcagccgcagcatggaaggcaatggccttggactgacattagtaaaaaagatcctcagtctctgtgacggcaccattgaggtgaccagccagccggaccttggatctaaatttacggtaaaacttcctgtaaactgcactacttaaagttctttaatagcagctatggtgcgtgcatattcttcatctactgcaggcatcaacttagctgctttttccatatcaccggagtttgtttctgatggacgcaggctctctgttacttctgctgctgccttataaagaggtccaaatcctaaattctgggcaacaccttttaaggtatgagcgccgcgaaatgcttccggggcgtttccgctttccatcgctgcctttaaattggcataactgtcatcatccagaaatttcaaagcaaacttgcgtaccagcacttcacttctaagtctggataatacatcttcataatcagcacccatcttatcataacactcttttaaactcacgactactctcctccttcataaacagatacactgttttttaacttttttactttatacatttcactgtccgcaagggcaatggctgttttcaccggaccgcctttatagacgcctccgatactcactgataactggatctgcggatatccttctacttttttcgcagaaacagctttgcatattctctccagcttatcaataaaaacatcttttagaacatgattgatcagtaagacaaactcatcaccgccatagcggatcagtatgtctgtacttcggatcacggagaagacaccttctgtataggctttcagcgccaggtctcctaccatatgtccatatttatcattgatctccttaaaatcatctgcatcgatcatggcaacaccgtccatatataccatatggcaggcctgctcttcataatatctccggttaaaagcaccggaaaggggatcacgatatatcttattgttatactgctcgatcttctcgatcagctcactccgtccataagctccaaaaagcagctcatcccggatctctgttaccatctctaaagcatatccctttccatcgatttccacatagtgagagatcacaagatatattttggagtctacaaattcgatctttgtcagctggcacctctgggcaacgactctggcagagatacagttttcacaccgctcctgcctgttccagactgcatagcaggcatgggactgttccggcatgacaacttctgtcttatctacatctacaaggcggactacgtcaaatatcttttttaactgaacgaccagttcgtctaattcccggtaattcattttgccccccccc

SEQ ID NO: 3566 - DNA, 19177 bp, Unknown
  gut microbiota DNA sequence
cgtaattcataaataaaacttccatccggccgatgcagttccacatccatagtgacttcaggtttttccggacatgtttctttgatccggctgatcacctgttctacatccacacaaggctctaacagctgtttttcttttcccagatcaatattatttttcgtcaggcccaaaagtgcagcgccccagtctgaaaaatagatcatacctgtactgctgttgtaatcaaactgcagctcattgctccaggtattgaaaaatgctgctttttcccagttccgttccatccagtttccagaataggaactttctccaatgtccttgtgttccagtatctcttctaccacactgtaaacctgtttatcactggtttttcctgtaggatttccacaaagattttcctggatctcctgggatgagtcctggagacactctaagatcagcggactgaactgcccgcattctccatttaagatcatctccattgccttttcatgtgaaaaagactttttataacatcgctcactggtaagagcatcatatacatctgcaacagaaacgatctgggcagaaatagggatctcttctccctttaatccgtccggatatccctttccgtcgtagcgctcatggtgccacctgcagatctcataagcagtctttacaaaaggcgtatccttatattcaggcagtgcgtctaacatctgggcacctgccatagaatgggtcttcacaatctcatattcttctttagtcagttttcccggtttatttaagatggtatccggtatactgatctttcctatgtcatgaagagctgatgccgttgctatacggacaatatcttcctgtgtgatctgatactttgtgatcctcttttgcaaatgctgcaaaagtatctctgtcatcatatggatatggcgcacatgctgtccgctctctccatttctgaactctacgatatgacttaaaatattgaccatcatatcgttgtttttttctctttcgtagacctggtctgctaccatctgcaccagacgcttctgcttggcataaagcatcagtgtattgataactcttcgtcctacgatcagggcattaaaaggacggctgatatagtcagctgctcccatctcatatgccttctctatataggaagaagaactttcagatgagatcatgatcaccgggatcacttctgtcatatggctgcgcttcataaagccaagcacgtcaaacccatccatctccggcatcataatatccaacaggatcagatcaatgtctgtcattccctgttgaaggatctctatagcttcaagaccattttcagcttccaggatctcataatcactgcctaacattacagccagtatgtccctgttcatctctgaatcgtctacgatcagtattttttgttttttatctgccatgtattttcaattacctctaaaacggaagttcctggtatataaaaacactgctccccttctggtacacgaagcctgaaacatagactttctttcaccatcaggaaagcagtgttttgagttaccaaaatcacatattattataaaggaaaatgtaatttaaaacaaccactaatcaaccagtttatccagctcttttacatattctgtctcatgacagtttttgtggtttgctttggaagcataaatattaacggctgcctgggatttcttaacaggctgcatggttccggcgccggctacacaaccgcctggacatgccattccctctaacagataaccgtcatacttgcctaaggtcgcaagctttaacagctgacggcactcttttaagccctctgcatttgcgattttaacttccatatccggcttcagttcttttaatacatccttaacagaagttgccacaccgcctgcaacagcgaagtttcttccgtctgtggaagcatcgttgacaccgtttggatcttcttcaatattttcaatatctacatgctttgcatcgaaaattccggccatttcctcaaaggtcagtacgaaatccacatcgcttcggatgctggtacgcattgcttccagcttcttagctgcacacggtccgataaatacaacctttgcagactcatgctgcttcttgatcagtcttgcagtcagggtcataggggtcagtgccatggaaatgcagtttgcgtatttcgggaatactttctttgccattacagaccatgcaggacagcaggaagttgccataaatgggatcttctccggtacttcatctaagaagtcctgtgcttcctgggctgcacaaaggtcagcaccgattgctacctcaaatacatcggcaaagcctaatttcttcatagctgctctcagttttccaggagttacctttggtccgaactggcctacgaatgcaggagctactgctgcgtatacacgttcaccggactggatggcacggatggtctggaagatctgggacttatctgcgatagcgccgaatggacagtttacaaggcactgtccgcaggatacgcacttatcatagtcaatgtctgccttaccgttttcatcagaagagatagcatccataccgcaggctgctgcacatggtctctgctgaacgatgatagcattgtaggaacatacagttgcgcactttccacatttgatacatttatcttcgtcaatatgggagcgtcctgtagtacgatccagggtaacagctccctttggacagacttctacgcaaggatgagctaaacatccctgacatccgtctgttacatggactctcttctctttgcaggcgttgcaggcaaatttgataacattgatcagaggcggtgtgtagtaggtctctgctctgtctgctgcttcgatattgtcagaaaccggtgcatgctcagatgcattacggcatggaagtcccattgccagacgcagtctctctcctacgatcgctctctctaagaatacgtcattacggaagtttccaacttctcccggaatgatcttatatggaagctcttcaatacgcttgtctaccggccattcggtatgataagccatacgggctacttctctgaaaattctgtggcggatctcctgaatacgggtttctactcctctcattcgctttctcctctttgttgtgatttttttaacagttgcatatagatcaaaaaagttttattaacataacagaaacagctcattcgggctgtttctgtttttattatacgcatatacgaaatacattgcaagtgattttctttctcaatagcttatgtttctgttaaaaaacaaacgaattacaggttattgaccatttaaacgtccatatctgcgggtcataccacggatctcttcttttaacaagtcagtcagctctccttttttcaggcgccatttccagttttctcctacagtagaaggcttgttcatacggtaatgattatccagtcccagatagtcctgcattgggatcacacaaagggcagctttagaacgcattaccaggctgtttaaagacttatataaatatttctttggagtgtaatgatcacacagataatcacgtaccatattctgttcttcttttgtaatgctgtcaaaccagcctgccagagtttcattatcatgggttcctgtataagctacggaattttccggataattgtgaggcaggtaatcgttggcacaaccggaatctctggagtcaaaggcaaattccagtaccttcatacctggaaaaccgctgtcataaaccagtttgcgcacagagtctgttacatagccaagatcttccgcaatgacttccttttctcccagcacctgacgtacccggttaaaaagatcgatccccggtccctgttcccagtggcctctggtagcatcttccgctccataagggatagaataatactggtcaaatcctctgaaatggtcaatgcgcactgcatcatacagtttaaaacagtgggaaagccgctttaaccaccattcatacccggtctgtctgtgatattcccagcggtacaaaggattgccccaaagctggcctgtagcagaaaatccgtccggcgggcagccggctactgcataaggcacatttttctcatctaactggaacaaagaaggattcgcccaggcatctgcgctgtccatagctacataaatgggaatatccccgatcatgcggatccccagactgttgacataggcctttaatttattccactgtttataaaaggtaaactgcaggtatttctgaaattctatgtcaaaatacagttctcttctgtaataatccatggcatagccataacgcaggcggatatcttctgcccactccgtccatggtcttccctcaaaccggtcttttactgccataaaaagggcataatcagaaagccaccattcattttctgcaagaaactgctgataatccggattttcactgatattgctgcgctcataggcctttcgcaaaataggataccggtcctcatacagctttttatagtcgatggtcccttctttggactctgtttccagtttttcacattccttttctgtaagaacaccttcttcaatcaggtcttctaagctgataaaataaggatttcctgcataggtggaaaatgactggtacggagagtcgccgtagctggtaggtcctaaaggaaggatctgccagtagctctgacctgcttcttttaaccagtctgcaaattcataggcgctttttgaaaagcagccaatgccgtattttgatggcagactggatacagataaaagtattcctgctgttctgttcactttatttacgctcctctttccctgtttttaatgcctgttgcaacggttctatatacctgttttgatcatcaccgcatagtgatccgaaactgccggttctcttttcccgttgcataaaacacgggactcttctatattaatatctccccaatgccagatgtagtcgatgcgcattccctgctcaggcgattttccttctgcttccttccagccatcgatctttggcggtgctgtaaatccggcatctttcttctctgccagatcccatgtatccttaaaaccgcttactcttacaagatcatagccttctccccttacagaagcaggactgttaaaatctcccatgacccacagggatgtttcttttttctccatcaggctctttgtattctttaaaaatgtttcccactgggctttaaaaggctcttcttcatccttccaccagcccatatgcacagtaaaaaaccagcccttttctgtgtgtattcccagagtttttctggttttccagttatagtaatcatcagaagcacttaagttaaatacacaggaagaaagaatgggacttttggaaaagattgccagtccttcgtcatatttatcatatcctacttttacagggatccaggtccagtagtaggaaagaccttttttccttaacgcttctgccagagacgcaccataattatcccggcgcattttcccttcaaagcctttgaccggctgataaccacaaacttctttctcatttataaatggttctgccatggtctggtttacttcctgaaatgccatgacctccggctgctctttttccaggataccggcaaacagttccattttttctgtggcattttcttctgccagactgtgtgtatttaacgtaaggatcttcattttacagcctttctattataaaatatcattaatatcggatttcagcacatctgcctttggtccataaacggcctggataccgccatccttctttaaaagccctaatgctccctctgccttccatgcaggcagttctgctactttatctacatcttttacagtcacacgaagtcttgtcatgcaggcatcaactaaaacaatattttccctgccgcctaaaagagcgatgatgcgctctgcctgggagtccttcttttctttgcttccagtttgtgtactgccctgatcttcctcttctgctccgtcatctgtataatttcccagacgtcccggtgttgcaaaatggaattttccgatcataaaataggcaaccacatatccgatcacaaagaatgccaccacgcagattacaaaattgatcagatccccggtcagtcctgcttttacagacatggggatacgggtgataaattccaggttaccaaaggaatgaagacgcaggtggataataccggccattgcaaatgcgcatccctgaagtactgcataaaccagatacaacggcagggcacagaacataaacataaattccagtggctctgttacgcctgttaaaaatacagcaagtactgtggataaaaacatggatctgtatttgtcccttttatccggatctactctcttatacattgcaagagcaataccggagatcagtccggtagcaccgatcatctgtcctaccttaaagcgggccggtgtaacggttgtaagaaggtttgtatatgccgccatgtctcctgcgcttttaaagttgatcaggtcattagcccatgcaagccataaaggatcctgtccaaataccttgcttcctgcatttacgccagtcatgatctcataagtaccgccaaaagaagtataattcataggaatggtcaacatatgatgaaggccaaacggcaggagcagacgctccagggtaccgtaaataaatggtgccagtaccggtgaagttgtggaagaacctgcgatccacacgccaaatgcattgataccgccctggatcaccggccatacaactgctaaaacagcggaaatgatcacagaccacaggatcactaccataggtacaaaacgttttccattgaaaaatgccagtgcatcgggaagttttctgtaattgtaatacttattgtaaacagtacctcctacgaaaccggatatgatacctacgaacacacccatattcaatgcaggcgcgcctaaaacagaggtaaagtatccatttacaaggatctcttttccaaacagtgtatgggtaactgcgtttggatctgccagcatgtcagaagagatgccaaacagcgctcctgtaattacattgatcaggataaaggcgatcacagatgcaaaggcaccgccggcccgttcttttgcccaggaaccgccaatagctactgcaaaaaggatatgcaggttgttgatgatggcccagccaatgctctccatagtgctccccactgtgaagatcatgctcatatcggctcctgccatctgtaccagttttccaaggctgatcatcagacctgccgcaggcataactgcaattactgccatcagtacttttcccagtttctgtaaaaagtcaaagttaatggacagctttttcttttctgattttggctctggtgctgaattttccaggttatcggacggatctgtctgtgttttttgttcatctttcaggttctctttggttgtttctgtcaaaagcacgctctttccggcttccacctgtcctggctgactctttaccaggactcttccttccattccgccgcagatcagcacaggagtgatggggttgatcttccgttcttccagaaattcaagatccacctctgctaacagatctcccgcttttacagtgtcacctggctttacatgtatcttaaaacactccccttttaatgatactgtttcaagaccaacgtggatcagaagttccacaccctcttctgttttcagaccataggcatgacctgtgtctgctacggatacgatctgtgcgtctgccgggcttacgatcttcccctctgttggaatgaccgccattccatctcctatgatcttctgtgaaaacacaggatccggaacctcttccaacggtactgccctgcctgtcagtggtgacagtatcaacacgttcttaccttcttctctgctcataaattgttccctcccggacattcttttgcggcctgctttccttttgtgccccgtctcatgtttttgcaagattgtgcaaccgcttgcattaaatataataagtttgcattgctttttcaagtgtattttctatattttccaggttttctattttttgcacaatttattctgccctgttttgtgcaattttccagttgttttatcaactccagaggtgtctcttctttcctgcaatattttatgcaatttttgcactgagtttgcgcaatctttattgacaaggctcttattctcttttaaaataatatcagacgatttttaatgatcccaggaggttttatcatggcggttaccataaaagatgtagcagctctggcaggtgtatcttcttctactgtatccagaacctgtaaaaacaatccctctatcagtgaggaaacaaaagaaaaagttcgccgggccatggcgcagttaggatatgagcccaacttccaggccagcaatctggcttcccagaattcccgtaccatcgggatcattctgcctgtttccgccagagaggcatacgaaaactccttttatctggaagccatccgcgggatcagccagctgtgcaacaagcggcagtatatcaacaccgtgatcacaggtgaaagtgaagaagaagtccttcaggtgatcaagaccatggcgcgcagcggacaggtagacggttttatcgttctttattcccgccaggatgaccccattgctgattttctctataatgaaggatttctttatgtgctggtaggaaaagcctattcccatgcaaaccagacgatctacattgataatgataatctcctggctgctcaggaagcaacggagtatctgtaccagatgggacacagacggatcggctacattggaagtgatacttccatgatcttctccgcagaccgtaaaagcggctatcagactgcccttttacagcacaatatccttccaagagcggattactgcgtggaaatgactgctgccataaacgcaggcggcaccagtgcgtcatctacagcaacagaaaaagacagcgcacctttacgctgtcttctctctttaccggaccgtcctactgctgttgtagtcagtgatgatatcctggctgcaaccttagaacgtgtctgcctggaaatgggtctttccataccggaagatctttccattgtctcttttaataactcactgtttgcaaggcttgcttcgcctcagcttacttctgtggatatcaattctttccagcttggcgcagaagccgctacccagatgatcaaccacattgaagatcccgggcttcctgccaccaagatcctggtgcctcatcatatggtagagagggatagttgctgcccgccgaaaaattagaatgtcctcatttgaccgttttaagttttctactggatccatgccccgtttccatctacataatagccatccggtgtacgggtattggtaagcatctctccactgtcacagcagtaataccatacgttattccactgtacccagccagttaccatatagccggatgcattaaagaagtaccagtaattgttgatatactgccactggtttaccggatagctgcggtccgcgttgcagtaccaccagccggtgtcatttttaagccatgcgccctgactagtgtttgtgtctccagggccgccgtcatcatctatggaattggaaggtgtatttccggaggattttccattgtcacggatatcttttgcttcgctggaggaaacacttaattcgtctgactcttcccagtcacctttgttggaggtgttgtagatcgcacgtaccttaaatgtgtaatcaccgcttcttgtgaaatagctggcgaaattgtagctggtgtctgtagtagagattgcagaagaaacgctgcttccatctctgtaaaggcgtacttcatagcgctttgcgtcttccggctcttcccagcttgcagttccgtcataatcatcccagtttaaccctgttacatccagatcataatcactggagtcacgttccagtttttccagagtaagactgacattcagttcatacttgccggaacggctgactgatgtaacggtagcatcatttctactgacagaaatatcactttttgtaatacctgtgccaaagtacgcatcaccatctgaggataatgtaaccttaatctttggtcttgcaccgctcttccactcgtcggacggctcgtttgtaacttccacatcatctacactgcagtatcttgaggaagtagttacatccacgtcacagtcgctgtctcctgcttcaatggacgaatcgatcttcaatgagatgctggtgatcttcgtgtctgcccacacattcattggcatggcaagactgagtgctgtaataagtgctacccatatttttcccgtcttcttcataaaacttctccttctgttccgtctgtccctgcagatttcccgaacctatcatcctaccccagacatctgttttcagacgttttttacttagttttagtatagcacatccttttattacttttctattacgatttcagtcttactttttacaatctctgatgtttccccacaaaagcagcctaaagatgacaagctgtgtgttttttgtctatcaagttcttctattatacataaatgtaatcgttaaggaccggctgcagaccgcctttttccatatccttatacatactggcgaaagaacgtccgtcattgatctcaaactgctcatctcctacgtctgcatcttccttgccttcgtatttctcctcatgatctccaattcctgtggatacaccggcagaaacctttgttgcacagatcttggtaatgccgtttctgaaagcagcgctttcacggctggatacagtaatacctgcaaatggcaggaaaatacggtatgcacagagaacctggcaaagttctttttcccctacatcccttggattgatcttgtcattattgacgataggacgcagtcttggacagcttaaagaaagctctgcatatggatatttccggttgatataatatacatgaagagccgttgcaagagcatcctttcggaaatcatccagacctaacagcgcggaaaagcctgcacctctcatacctcccataagagcccgctcctgggcatcaaagcggtatggccatacacgtttatgtcccataagatgcaaggtttcatacttatctgtattgtaggtttcctggaataccgttacataatctacgccacattcatgaagatatttatactcatctacatttacaggatagatctcaataccgatatttcggaaatatttccgggcaatcttcactgcttctccgatatattttacatccgaataggccctgctttcccctgtaaggatcaggatctcttccataccggtctttgcgatcacctgcatttcatgctcgatctcttcaaatgtaagttttttgcggcggatgttgttgtagcagttaaaaccgcagtaaatgcagtaattctggcagtaattggcaatataaagaggggtaaaaatgtatactgtattgccaaaatgattttttgtgatctcctcagcttttctggccattacctccagataaggagctgctgcaggggataaaagtgccttaaaatcttcaatggaacatgtttcatgggacagcgcccgctctacatcccctgccgtataggcatcataaccaaaggctttcatggcctcttccactttgtccttgatgtcagactggatcacttccatcccttccatgtattccatgtggttggtacggaaagttggatcctgctctaagcggtgcttccgctttaatgcttcctcaggcagcttatcactgtctacaaaatagacctggttttcttcgttcatgtccgctgcctcctaacgtaaaaagcctgtaagcggatcagatgcgctgccgcctcttgccaggactcttcccattcctgtaaggtatgcttttcttcctgcttcaatggccagcttaaaggcatttgccatagcaggcacatctccggccgttgcaatagcagtatttgccataactgccgcagcacccatttccattgcctcacatgcctgggacggcttgccaatacctgcatctacaatgataggcaggtcgatctcgtcgatcagtacctggatcatggccttggttgccagacccttgttgcttccaatcggagctgctaaaggcataacggctgctgcgccggcgctttgcagatctcttgccacatttaagtccgggttcatataaggcagaacgataaagccctcttttgcaagggtctccgtcgcttttactgtctcataattatccggaaacagatattttgtatcacgcataatctctactttgacaaaatccccacagcccatagcccggctcagtctggcaatacgcactgcttcttctgcgtttctggcaccggaagtattgggcagtaatgttactccttccgggatatgatccaaaatattttctttttcctgggtatttgctcttcttaatgccagagtaataatctcggcgccgccctgttctaccgctgccttgatcagattgatattatatttgccggaacctaaaataaaacggctgctaaattcttttcccccaagaaccagtttatcttccatgttgttttcctctcttttcacatatgtacatatttatatatttttctgtttacaggcttcttctgtttatgactgcaggatcagctgcagtactttattggcctgatgggcagcgcaggctgctactctgggcgctataaggccgatcccatttcctacatctgttttctgatccccgcatacataaagccgtctcatcatcttccttgtctgtatgtcattggtatctcccagacctgccattccatttcctgaaacgaccattgtctccggacattgtcctaaaagttctcttaccagcatggctttctgatctggtttgtcaaaggcttcacagacaatgggatacatttcaaacagctgctttacattttccggtgtaactttaacacaaacagactcatattccagatatggattgatctggcagagtatatccggcaatgcttctgccttgggtctgcctaaatgaggaatcatatacatctgacggtttaaatttgtcacatccactgtatcaaaatccactaaaagcaaatgtcctatcccacttcttgcaagcattacagctatgttagatcccagtcccccaagtccggctactgccacacgggcgttggagaatttctccttcatttcccgtggaaatctggcatcaaaagcccgttccagttcttcttttgaaataagggcctgcattttttcctgtatggctgtcattttcagcctcctcctacaaaacaaagtatttcgatctggtcaccttcctggatcagggtattttcaagctgatcctggggaatgatctgtaaattctgttctactactacacggcttgtatcgtatccttcttctgataaataggcatagattgtttttccagctgcgtttttttcttctccgttgattgttaccaaaacagttcctcctttctgatctaatgtgctttctgttatctgtgcagacgttttttagcaacctgcagaacctgccaccggcagtttcttcctgatacatggcaacaaaaaacgcctgcagatgttatatccacaagcgttttatacattcttctattcatcgccgggatacacataaaatatgttccggcgccttttaagtttgtgaaaagtggtgcccccagttcacaaagcagaaatggtactgtgtccatttcctactttttaatattacactaacttagaatttttttcaataagatttttctgaatattacaaaatattgcaaaattctacactattacaacgatttttccggtaatacgatccatctgtcttccagattatggatcgcagcccgtatcccataggctttttcgatccgctctggtgtgatcacctctttggtggctccttctgccagcacatgaccgtcatggagcaatgccacccggtctgcaaaatcaagagccaggtttagatcgtggatcacggctgctactgccagattcttttcccggcttacttttaccagaagttccataacttcatactgatagcgaagatccaggctgctggtaggttcgtctaaaagcaacacctgaggctctcctgccagggctctggcgatcaatattctctggcgttctccaccgcttaactgtcccatctggcggaaagcatagtcagacagtccaaactgctctaatacctgggcacttttttccacatcttcttttcctgtttttccgccggaaaatggaagccgcccggaaataactgtttccataacagtaaggcttaaaccggcctgtgtattctgtggaacatagccgaagatctttgccttttccctgagggaaagaggttttgtgtcctgtcccagccattttacagttccatcagaggcttttaaaagaccgttgatacattttaataaagtagattttcctgctccattggcacctaacagcaggcatacttcccctcgtctggcgcagaaaccggttccttttaagatctcacgttttccataatggaacttaattccggaaacttccaggtcattggcagttcccattccaattcccgatccattctcatttccattttcggttttggttccatttccaatcacatttttcttttccatcacaggctcttcctcctttcacgaaggatgaggtacaggaacaatggaacacctacataggaaacaacaatgcccaccggtactgtagtaggtgaaaatgcatttcttcccagtgtatcagccgccagcactaagaatgctcctgttacagcggaatagggaagcagatgacggtaatcgccgccaatgagcatacgtgccatatgaggcgctaccaggccaacaaaaccaatgataccggtgaaactgactacagaggctgtaagcagagttaccgcaccgccgcaaagcagtctggtccgctttacatttacacctaaggctctcgctgtctcatctccaccatcatctaacaggttaaatgcccatgcctggctcataaatacaggaaaagatactgcaaagaaaaacagcatgatcccgatatctgaccatgttacggctgtaaggcttccaaaagaccagtgtacaatggccggaagctgctgctcattcgctataaactgcatggtggagtttaaagcattaaacaggtagtttaaggcaattcctgtaagaactaatgcttccggacgaagctgtttgtaacttgccactgtataaacaacaatggcgcagaccacagacatgacaaacgcggccgctacagtagctcccttctgcatccataaaggaaagccgccaaacaagatcataagagccgctccaaaagctgctgcactggaaagaccggtagtaaaggggctggccatcgggtttcctgtaatagcctgcataccggaacctgcgatccccaatccggctcccgcgatcacagctgctgcaattcttgggagccttaacataaggagcacgttctgctctttcgcatctaaagacgctactcctttaaacattccgctaaaagaagggagccatgttacgatcatacggtctggtgtcagctgggctacccccaggcaggcggcccatatagctgctaccagtaacactaatagaagaacagccaggagaatgttctttctcctggctcttcgcagataatcacctgctaaatctcttttttcctggttatcatccgccctcatggtcattaaccctgtgcaggtacgtgatagtaatgaggtgcgtttggttcaaatccctgatacttcatccactgagtgaagattgcatctgggtctaagtcggtcatcagatccggatacagccattttgccatgtaagcagcaccgatcatctttccaaggccgccgctcataaatgctgtattcagatagaagtttccttccttaacagcctttaaatccttccagcctggacgcttcagcatttcatctgctttctctgcaaactcttcctgtggaggtgctgtaaatacgccgctgtttccgattacattcttaccagcgtagatctttacgatcaggtctggatcttcggttaagatctgctctggatcaatgtccttacctgctaaagaagcatcaccaaaaatgttgataccgccagccatcaggatcatgttgtgccagccgtcattggaagttccagggatacaggtgctgtaatcatcgccgtactcccagtaaacttttttacggtctgttacctgctttaactgctcattgatataatcaactggtttctggtagaaatcaaccagttcttctgcctgttcctgctttccaaacagctcgccgcaaagacggatctgcttcggaacatcagagttatcccaacctgtgataacaactaccttgataccaaaggactctaatttttcaacagactcttctactttaccgttctttggaactaccagtacctgaggatctaatgcaacgatcttctcataatcgtactcatcttttccaaaggtctcatcttcgccaaactgtggccagtatacagggtcctgggaggtgtactgatctacaccaacaactgcatcaccagcgcctacggcacggatcagctcattattataacggtttgcaacacaagcgcgggtgaccggaagttccagttctacttctcttccaaggtcatctacgaatgtagttgtttccccttcttttgcttctgcagtagtttcagctgcggttgtttcctccgctgtagtctctgctactgttgtttcagctgctgtggtctcctgcttggaagcagaaccagagcaaccagttactgcgatcattgcgcctgctaagatcgctgccagccatctcttgctgtttctcatttttatgtctcctttcagtctgctatcctgtgtgtttcccttttactgtttttatctattgatatacagctttttgcacaaggataaaatatgctctccatcataaattgcataacagagccatatcttccgcaaaattacaaaattgcacatttatatagtgcatatgtatttgcagactgaaaggtaatagtccctgtcccagactattcctctgtcagacatccggccggtctcctggcttatggttcatcctccggacgtcttcccgctttcgcagtgacttttttgtcctttgtccccgtttttacagtagaggcagctgcgggggattttcaccccacttccctgacggtctttcatttttctgtaccagaccgccttttttccagatgctgcaagttttcagttgagcctttaaaagggtatcactttttgtctgatttcgcaacacctttttattacactgcaatgtttgtatttctatatacctttctcctgtcgtttctgtctctgcaaaagaaggaataacccggtacagaacacaaccgacataaaagaaccacccgctgttgccagtcccattggaaataatgtttccgggaatatcttagaggtaagatacactcctgggacacgcaccagggcaatggaggtaatattgtgaataaaggaatacccggaccgtccacaggcacaaaaataaccactgaaactgaaatggatccctgcaaacatacagtcccagatataaccttttaaatactgggcaccggcatagaccactgcctggtcattggtaaacaggttcactacatttcctgctgtaaactggatgataatggcaatgatcagaccaaatcccccggcaatacagatggcatattttaaagtagctgccgcccgctccggttttcctgctcctacattctgggcacctaaagctgatactgttgataacatggaagacggcactaaaaacagaaagctgatcactttttccacaatacctactgctgccgcatctgtaagacctctcctgtttgcaataatagtgataatgataaatgccacctggatcagaccgtcctgcatagcaataggaaaaccgatctttaacagtctgcccatggtctcttttctgggcttaaaatcgcttttctttactgtaatccctgtttttcccttcataaacatggtcagggccacgatcacactgacagtctgggataaggtagttcccagcgctgctccggaaggtcctaaatgcaatacgcccataaaaacgtaatccagtgcaatatttacaacacaggcaatggcgataaaatacataggactcttagagtctcccattcccctgaaaatagagctgatgatgttataagctgtaataaaaggaatgccaaggaaacatatctttaaataaagagcggttcctgctagtgcctcttccggcgtagacataatggatacgattgcgtttacggaaaggaataaaaccaccgtcagaacaaccgatagtaccataaataaagtagctgtatttcctgtatccgttgctgctcttttcttatctcttgcgccgatggcctgtccgatgtttatagttgctcccattgccaggcctacgatcataacagtaagcatatgcattacctggcttccaatggaaacagctgtggtacttgccacgccttcaaactgaccaatgatgaacagatccgccattccatacagggtttgaaggaaataggatagtaaatacggaagggaaaaatagatgatgtttttaaatacgcttccttcagtaaggtttctttccatgatatgtgtctctcctgtgttgtcttattgcaaattgatctatttgcttgtatcagtttatactctacaacagttgtagggtcaagtgtaatgatttaagaaaaacaaaaaacctgagcatttctgcccaggcaaaatattatttatattatacataccttcaaaaccacatattgaactgttgatcttccgaatacttagaacctttgttttccaactctgcggtcattcataaaaccgcaccaccagaccttattggtcaagccctcgaccgattagtatcagtcagctccatgtgttaccacacttccacctctgacctatctacctcgtcgtcttcaagg

SEQ ID NO: 3567 - DNA, 193 bp, Unknown
  gut microbiota DNA sequence
cgcttatgcggtattagcagtcatttctaactgttatccccctgtgtgaggcaggttatccacgcgttactcacccgtccgccgctcagtcaattttttatccatccgaaaacttcacttaaatcgcttcgctcgacttgcatgtgttaagcacgccgccagcgttcatcctgagccaggatcaaactctcat

SEQ ID NO: 3568 - DNA, 64778 bp, Unknown
  gut microbiota DNA sequence
tgcttcgctcgacttgcatgtgttaagcacgccgccagcgttcatcctgagccaggatcaaactctcatgttaaaaagttgatacttggttaagactacttagcttggctaatttatctaacccgttttacttggtttttgttctgaattttctcaaaaatccaaaggtctaaaccagaccttttattttctgaattttcagggttttacatactgtttaatcttcaattatcaaggatctcatttcgttgtcagacttgtttgctgcaacggttatttattataaccggttgtttttcatttgtcaacaacttttttaatttatttttttgtttctttcgaaacatttgctgctctctcaagcgcgaaaattataatagcaaatccccaaccgtttgtcaacaacttttttcaggtttttacaattttattttgcagacatgatttgtgttttttgtttccctacaaattatgttataatcaaatacgaaactttgcgccttcctttaacggtagaatggagatctccatgaagattacaaatgaaaaacaacaatactatggactggatcttttaaagtttattatggcagttctggtagctgccagacatgtgatccagatctattatcccgctgaaagcaaatggcgtctggtgatcggatgctggctgtccaatctggcggttcccattttctttctgattgcaggatttcttctgtttcagaagatacccgctcaactgcctaatgatacaaacacaactgataccgatataaaaaacagttggcccattgccaggcgttatatatgccgcatcctgaaactgtatatcctctggtgtatgatctgctggcctattgacatttacaactgggtccagggaaatgagaccattgcccaagcagtccttttttatctgcactctttctttatgtcagctaccattacccagctgtggtacctgccagctctggccatagccagttttatcgtctggctgttttacagagcgaaatccaaaacctggatgctgctcctttttacagggatcctttttattttgggatgtatctgtgacaaccgtgttcttttagagcatacgcctgaaacacttcaggcaatacttcaagcttttgtccggtggtacacgccccggttcatgactatgcgaaacggcgttttttatggaagcttttatgtagctcttggtgcctggtctgcaaagagggaacggcatctgtcacctgtaccggccgctttgggaagccttttctttctaagtgtaatgtacatagaagtttccctctgctccaatgccaatatggtattatcagcagcacctgccgtcgtctgccttacagaactggcattaaaccttaccggaactggttccagatttttcctttttttacgggaacaaagtgaatggatctatttctcccattactatttcatccatttgtttacctggaccattcattataatccacttcctatgactaaaacaaacattatgctttccgttctggtccccatgttcctgtttacattgcttatatcatttctgtcccacaggaagcatggcaaatggctgagggcactcatttagatcagcggatgcgccactggcgtctcctcgatatgcctggcaacaattaaggctgatgcaaaaaagatcctatctcttctgcatcagccttttcctgactttatttacttaattctacttacttaaatgctgctaccagctcttctgcatcatcatatccctgtctctgcagttcgccgatataccattcggttacaggttctacgattgccttaaaggagtcgatatccagttcatcattattaaccacttctacgccattcttagactgccacctggataagatctcgtcatctccggcgcggttgatctcacgctcatactgaacagctaattttccgcactcatctactactgcctgctgctcaggagttaaactgtcgtagatatcctgattaatgcagaagaacagacagtcatagtttgcattccagagagatacatatttctgtacttcctgtacactggctgcatcgattgctggaagcgggttttcctggccatctacggttccctgctgaagagcggtgtatgtctcggaccagttcatattggtggcatctgcgccccaaagctcatagcacttcatcagaaggttagaacctgctactcgcagcttcaaattcttcatatcttctacagaatgtaccggacggacactgttggtcagctggcggaagccattttctgccattcccatacaatgtaagccataggaagataagatctcatccattttctgtcctgcttccccgtccagttttgcgtctgcatcttctacagagtcgaaaagatatggcaatgaaactacgttaaaacgtggatcaaatgcagaatagatcaggttgctgtgcatggagatctgtaccgggtcaccattcatcagggcctggatgccttcggactggttaccgccggtcagctggtctgctgcatatacttctacttttacttttccgccggttgcctgatccattaactcgccgaatttacgtccggcctgggcccaggtactggtttctgtggtagagcaggtgaaattccaggtcatttccggccagtttaagtcactgtggtcttctacctggtatgcagatgtgcttccggtgctttctgcgcctgctgcttttgctgcattatcggtgaaaatgtgtaccaggtcttctgcatcttcatatccctggttctttaactcattgatgaaccactcggttacaggctctgctgcattcttaaaggactctacatccagatcctcgtattttacaacttctacgccattctttgactgccagcgttctaagatctcctcgtcaccggcgcggttgatctcacgctcataagcaactgccttgcggcctgcttcgtcaactaccttctgctgctcctgggtcagactgtcataaatgccctgattgatacagaagaacaagcagtcataatttgcattccagagagatacatatttctgtacttcctgtacgctggctgcgtcgatcgctggaagtgggttttcctgtccgtctactgtcttctgctgaagagcagtgtaggtctcagaccagttcatattggtggcatctgcgccccaaagctcataacacttcatcagaaggttggagcctgctacacgcagcttcaggttcttcatatcttctacagaatgtaccgggcggacgctgttggtcagctggcggaagccattttctgccattcccatacaatgcaggtcatagctttccaggatccttaccagttcttctcctgcaggtccgtctaaaacagcatccgctgcttctacagagtcaaacagatatggcagtgaaactacattgaaacgtggatcaaatgctgagtagatcaggttgctgtgcatggagatctgtaccggatcgccgttcatcagtgcctggataccttcggactggttgccgccggtcagctggtctgctgcatatacttctaccttgatcttgccgccggttgcctgttccattaattcaccaaacttacgcccggcctgggcccaggtactggtctctgtggtagagcaggtaaagttccatgtcatttccggccaatccagatcactgtaatcttcaatggtattaaaatcgtcattatcagttgctgtggtaccgctgtcaccgcctgtggtggttccattttcaactgctgccgcacttcctaatgctgctggaaggaaagtggaaattcccgggatataggtgatcataagcagaaccacgatacatgcagctaccataggtacaactgcacgggagatctgctgtaaagttacctgtaaaccattcttcagctttacaccgatggctacaaacaggttgacaccaactggcggtgttacctgaccgattgccaggttgacggttgccataataccaaaggcgatcacattgtagcccaactgcttgcatacaggaagcatgatcgggatgaaaatgtacatggctgagtttgcgtcaataaagcagcctgcgatcaggaagatcacattgcagatcagcaagaaagtgaactgattgcctgctacttttgccagcagctgggaagctgcagcagagataccaaaacgggtacatacaaaggagaacagagacgcacatgctacaataagcatgatgccgccggtagtctttgcagagtcaataaggatatcccaaaggtcttttaattttacttctttataaattaccatacctacaaaaaggccatatacaacagaaacggctgctgcctcagtaggtgtgaaaataccgccgtaaataccgccaaggatgataactggcattaaaaatccccagaatgcgtctttaaatgcgtccagacgttcttttgcagatgccttctgtacattggacggaacgacatggtttttacgcacttctaacattaccactacgatcagtgcaagtcccatgagaattccaggaacaataccagccatgaacatgtcaccaatagaaacgccggtaatggaagcatacacaacgaaggcgatacttggcgggatgacaatggcaatggagctggcagttgccattaatgcagtagagaatggagcggagaagccgcctctttctaccatagctgggatcagaactgcgcctaatgctgctaccgttgcaggaccggaaccggagatcgcgccgaagaagcaggcaacgatgatacatacatttgcaatgccgcctttgcggtgtccaacacaagtgtcaacgaaacggatcagtctggtggaaataccggcctttgccataatgtttccggataatacgaaaaacgggatagcaagaagcaggaatttgctgataccggagtaaatgttagttgctacaatggttaaagaagttcctgaatacagaatcgctgctgcggatgaaagtcccaggcagatagagatcggaacatttaaaaccagtaaaacgaaaaaggtgataaaaagaactgcacttaccatttatttatcctcctttttcatatcattcttttctgctgcgtttgtttttgcacattcatccacacaatactcaataaagtgcaggaccatgcacacggaaccaatgggtacgaaggaccagaagatccattccggccagtttaatacgaaggttcgtttctggttggcaagctgtgccaataccttgtccataccgtaatagaataaaattcccataaaagccacggaaaaaagtgtgatgagaatgatcactggctttttacatgactttggcaggcgctctgttaccaagtttaaacctaccagacctccctctcttgcagacaatgctgcgcctataagggtgatcagaacaaaaattgcaaccaccagttcctctgtaaaagaccatgactggtggatcactttacgtgaaaacacgtttcctactgtcagtacaaggatcatgatcatggtagctgccagaactgctttttcaaccagcgctacaaagtccataagctttttgtaccctttcatactgctctcctcctaaatatgtaatgcttttacctgtgtaagatcctgtgttatttccgctttttctatatcattcttttgcatgatgcatcagtgaatataaaaaatccgccccttaagatctaagggacggatgattaactgatcctgtcagaagttttcacttttcacggaaagtaaaacacctgtagtatcgtataaacatacgctgctgccgcttatgcggatcttatgaaaatacaggtcctgtggctcttgctctcagtcaatcgaagcctgcctttattttcataacaggttattaataatgtacgtattattgtacacgtattctcaaaaaacgtcaaccgctttttattttttaaagatggtctgtaagatcttcctgtattgacaatgcaaacatttagatgtaccatcaactatatagatgtatatacatcttctctttagaaaggatcgttaaatctatggatgatacacagcgtaaaataacaaaaatagccagagaagctgccaaatttacagtccagaccatgaaagccgagggcatcggcacagctgaatttgactttatccatctggtccgccacaaaccgggaatcacccaggcagaaatccgtgaaaccttaaagatcgacaaaggagccgctgcccgccgggctgcaagcctggaagcaaagggctatctggtacgaaaaccaaatcctgaagataaacgcagccagcttctttttgccacagaaaaagcggaagagctgaaaaactccaaggcaaacattgaagacgctttttatgactggctcattgctgatctctcagaagcagaccgcagggaattctgccgcatcctggatatcctttactggaaatccaaggaagaacggagagtagactttacccatgtatcggcatggaccaatgaaaaactttcccggatccccagcgaagaaatgaccgatcaaaaaataccagataaagaaatactaaataaagaactgcccccaaaaaaggctccggaaaaagaaccacaggaaggagaactctcacatgagtaaacaatctgcaccccccatatgcaaacatccagaccatgtcaccagttatttttccatgcaaaagggaattttagctgttatcacagtgtccggtcttatttacaatcttggacttatggcccgtccctggtttgaaggccagatgatacagtgcctgttttttatccagaaaggccaaagtcatttttcagatatgctgaaactggcatctgcttattttattgccatttttacggtacagatctcccgtttcatcaaacgtctgtatgtgcgccgcttcgccaacaacatcaaccgcagtatgaaacagacgtattataacaacctggtccatacggatacctccgatctgaaaaatgtcaataccggaaatgccatgacaaaagctttatccgacgtagacgcatgttccgaagggatccgtaaatttacaactgagatcttcgatacaggtgtagcactgttttcctatgttttcatgcttttcgcctacgactggaaactggctcttttgtgccttatcttccctcctgtttcctatgtgatcgcagaaaggatgaaaatcgttgtcctgaaaacaggtgctgcctgcaaagaaagcgccggacgtttaaatgccgcaaccttagaccgcatccaaaacgccattacctaccgtatttacggctgtgagacccagagaaataaagattatgaagcccacctggctgattacgaaaaagcctctgtacgtgcggatctgccggtagcggccctgcctcctatttataagcttatttccatgaccggcgtccttctcatcttttattttggaagtaaaaatgtaatgggaaccggctggacttcctgggatattgccgctttcagcgctttcctttcctgtttttccaggctgtctgtaaaatcttcccatgcagccaagctttttaatgctatccagaaagcccaggtttcctggaagcgtatccttccttttatgaaagcaggaaaagaagacaaacctctgccagcttccagccttggacaggtaaacgcaagatcccttggattttcctatgaaaacagcgctcctcttttcaaagatctgacattccaggcttctcctggtgagatcattggtattaccggcccggttgcctgcggaaaatccacattaggacggatcttcctctgcgagcatccttacaccggctccctcacctttaacggtaaggaattttcttccctttcaccagatgtgcgcaattctctggtgggatacttaggacatgaaccggatctgttaagtgataccattaaaaacaatgttttacttggggatcaaaaggatctgtggaaatacttagaagctgtatgcctggaagatgaggtacgtcatatgcctcagggtgaagatacagtaaccggtgaaacgggcctccgtctttccggcggacagcagaagcggctggctctggcccgtacactggcccatccccgcccgatcctgatcttagatgatccattttccgccttagacaagacaacagaagtagaagtgtttgaacacctgcgtcaaatggtgccggacagcattatctttctcatctcccatcgcctgtatctgttctcggaaacagacggcgtgatctggatggataatggaacagcagaattttcttcccataaaaaactgttgaaagataatagtgcttacagagaattatatcagcttcaaaccgactattccgttgcaaaaccaacggaaagtgcgattgaaagggggatctgctgactatgaaaacagaacattctgtccttaaggttattttacgcactgtaaaacagaataagggaatgtgcgtaactttatttgctgctgtgttgggatctgctgtctttgcccttctcccgccgctggtactggcaaaagccattgactatcttacagccggccagacctttccttttgctctggctctgtcctattttggactgcttttattaacaaatgctgccacctctttgcgtgaaagccttttgacgatcttcgggcagcgcattacgcatggactgcgcactgttttatgccagaagatcagccttctgcctgcagactcttttgtttcccatgactcaggagccattgcttcccgttttgtaggtgatgtggatacagtagaggaactttttacttccggtatcatcagcatgtttgcagacgcctgccagctttgcggtattttctttgtgatctttacgaaaaaccgcggtctggctattctgctgctttttgtgctccccgctgtatttttctacacccgtcatgtacaaaaacgcatgcttgcatcccagttaagtaaccgtgctgccattgcaaaagcctctggtcatgtaccggagacactgcgctgtatccgcaccattcacaatcttcacaaagaaatgtatatggaagaaaaatacagtaaatttctggaagacagctataaggcaattgataaaacaaatttttatgatgctatttattcaccggtcatccttatttccaattcaattaccatcgccattgttatgatcttatctgcttttggaaatggggaagtccagctgtttttcggaatgtctgccggtactgctgccgctgttatttcctatattacccaggtatttacacctcttgaaagtattggtatggaaatacagaccattcagtctgctgctgccggagtacacaggatcaatgaatttttgcagcttccggaacgtaccaaagctagggaaacaaacacttccagaccggatccggctgcatgcccggtagaacttcagaatgtaaccttccgttatgaggaaagtgacccggatattctacagtccctcagtttttctgtaaaagaaggggaacaggttactttgaccggacgtaccggtgccggaaaaagtactatttttaaactgcttttaggactttatacacctcagaaaggaaacgttcttattaacggacagcctgccgatgcactctctgaaaaccagagacgaaagatcatcagctgtgtagaacagaatttttccatggttcccggaacgatcctggaccagatcaccttgtttgacccggatatcacattggaacaggcccagactgccgcaggtcttacaggactggatgaagttatacgcagtttcccggaaggctacaacactccctgcaaaccaggtcttttctcccagggacaatggcagctgctttccattgccagggctgttgcaaccaacccccgcatccttttattagatgagatcacggcaaatcttgacgcagacacagaacagaccgttctttctgctttaaaccgagccggaaacggacgtaccgtgctttccatcagtcaccggttatatgaaaaaaatggcggacggcagattgcgatctgacgcccgctgggatttcatttttcagctgtagaatgatccaggtcactctggcaaatcctacagcttttttcttatatttctccaaaataccgttgaaaggaccaccgcgatatagtctgtaattgcctgaccgtatatcacgccttctaatcctgcgatcagctgcaggatgtaaagcagcggaatcaggaggacgccctgacgcataacggaaaggatggttgcaggcaatgcgtaatttacagactgcatacagttcatatttacaaaaagcatgccgatcacaggaccggaaagcatgtatgcaatcagcatctttaccccataataaaccacctcatcatcactgatgaacatgcggataataggctcttttcccacaaaatacagcagtgtggccgcaactccggctatcaggcagcagatcttcgtaaagcgttctacttcccggaagcggctgatatttccagctccatagctgtaacccaacaatggctgtactccgtttgccagtcccatttgcaggaaagtaatgaacatattggctttaaaaacaataccgatggctgccaccggtgcatttccatattttaccaaaatctggttgactacaatggtggaaacgctcatgagaacagaaaagatagcagttgggaagccggtagtgcagactctctgcgggatattttctcctaaagtaaagtcttttggaagaatggacagctgaccggatctctttaagaaataccatacaaagtacagacttgccaggatatttccgatggtagttgcaatagccgcaccggcagctcccatatgcagaccagagataaacagggggtctaatacaatatttgcaatggttcccaccatgcttccgatcatagcttctttactggcaccttctgcccggactacaaagctggctgccgcagaccagatgataaagggagcgccccaggcaatgtaatggatgtaacctttagcgtattcataggtttctgtatttgcgccaaaaatatgtaagatgggggacataaatgcaaataaaataactgcaattatgatgcctactgctaaactagcataggtgataaatgcggtagtgttctttacttttttgggttttccttctcccattgccatggatgccacggcgcttccgcccattccaaacatattggcaaaagccataaggagaatgaaaatagggtttgtcagactgactgccgctacctgaagtgcatctcctgtctgtcctacgaaaaaggtatctgccatgttataaacgactgtaaccagactgctgatcacacttgggatcgccatggcggctactgcttttgacaccttcatagaacgcatcagttcctggtctgtacccgtttcttttgctttttccattttgcttttcttcctttctctatcctattttcttctatcctgtttcctggaaacttctttaaggatcagcttccttactgattgatctccttattgattagcttcgtccagattttttagcattcgctctccgattgctataaagatctgcctttcttcttctgtaataccttttaataaaatgctttccgactcgcctatttcagcagcgatcagatgacggatttcttcggccttggacgtaaattcgatccgttttaaacgggcatcctgcttttcactgacacggcagatcagttctttcttttccagggcctttaatacttctgtagccgtagatggacggagaccaaattctttttctatatctttctgataaatagaatgtttctgtccttccactaaaataaaatttaaaatattcccctgcgccccgctcattcccagtgtttcctgtaaagctgcagatctgcggcgcagacggttagatatacggttaatgacttttcctgtttccatatgactgtactcctgtgtttttgtaattagttcggttcctaagtattttagataaaaaaatttcagaagtcaaggattatttactgctgttatatctctgacttctgaaatatgttgtcgtttattacttataaataccgcacatttatgatcctacgcctgtgctaacaggcggaatctcctattaatcactgttccagatatttcttcacatattttcctgtataggaaaccgggctttctgccacttcttcgggagttcctttggcaatgacagttcctcccttgtcgccgccttcaggaccgatatcgatgatatagtctgctgttttgatcacatccaggttgtgttcaatgacaacaacggtatttccaccgtcggacaggcggcgaaggatctcgatcagcttgtggacatcggcaaaatgaaggcctgtagtaggttcatccaggatataaatggtctttccggtactgcgcttggaaagttcggtagcaagtttgatacgctgggcttcaccaccggaaagttcggtagatggctgtcccagacggacataaccaagacctacatcatataaggtctggatctttctggtaatggagggcacattttcaaagaatttcaacgcatcttctactgtcatatccaggacatcatagatgctctttcctttgtattttacctccagtgtctcacggttatagcgctttccgccgcagacttcacagggcacgtatacatccggaaggaagtgcatctcgatcttgatgataccatcgccggagcaggcttcacagcgaccaccttttacattgaaactaaatctgcccttgttgtagccctttgcttttgcatctgctgtagaggcaaacaggtcccggatcaggtcaaatacaccggtataggtagccggattggaacgtggggtacgtccgattggggactggtcaatagctataatcttatctaactgctctactccttcaatgcatttatgctttccaggaatggtccttgcgcggtttaacttctttgcaagggctttatataagatctcgtttacaagagaacttttaccggaaccggatacaccggtcacacaggtcatcacgcccagcgggaaggaaacatcgatctttttcaggttattctcttctgctccccgcaccgtgatccagcccgttggagttctgcgctgatcaggaaccgggatctgcagacggccgctgagataggcaccggttattgactccgggtttttcatgatctcttctgcagttcccactgcaacgatctgtccaccatgttccccggctccaggtccgatatccacaatgcagtctgctgcacgcatggtatcttcgtcatgttctactaccagaacgctgtttcccaggtcacgcagatgcaataaagtttttaacaatttatcattatctctctggtgaagtcctatacttggctcatccaggatataggctactcccaccagaccggatccgatctgggtagccagacggattctctgggcttcgccgccggaaagtgtgcctgtagcacgggaaagggaaagataatccagtcccacatcaataaggaaactgatacgtgctttaatctcctttaaaatagaggcaccaatggtctgctgcataggtgtcagcgtcagcccatccataaattccttaaatttcacaatggacatattagtagcctggtaaatattcagaccgcctactgtaactgccagagactcctttttcagtcgctgtcccttgcaggccggacatggggtgatccgcatataggtttcatattctgccttggaagcttctgaaaaagtctctttatagcggcggtttacattttcgatcaggccctcaaatgctacatcgtagatgccttcacctctctggctcttatagcggacttttacttcatgaccgccggtaccatagatgataatatcgtggatctcctttggataatcctgaaatggagtatccaggctgaaatgatattcctctgccagtgcgtctaagatagccctggtaaagcttcctttgtccgtacaggactgccatcccataaccacaatggcaccctgggaaatggaaagggatttatccgggatcatcagatcctcgtcaaattccatcttatagcctaaaccgaagcactccgggcatgctccaaatgggttgttaaaggagaagcttcggggctctacctcgtcaatactgataccacagtccgggcaggaaaaactctggctgaaattcaccggttccccaccgatcacatctacagtcatcaggccgttgcttaaggacataaccgtctcaatagagtcggtcagacggttttcaattcccgcttttacaaccagacggtctacaataatatcaatattgtgcttaatgtttttctctaatttgatctcttcggaaagttcgtacagatttccgtcaatgcgcacacgcatatagccgctttttctggcctgctccagcacttttacgtgttcgccctttcttccacggacaaccggagccaaaagctggatcttggtccgctccggcatagccatgatctggtctaccatctgatcaatggtctgtttgtggatctccctgccgcactttggacagtgggggataccaatgcgggcatagagaagacgcatatagtcatagatctctgtcacggttcccactgtagaacgtggatttcggttggtggatttctggtcaatggaaatggccggagaaaggccttcgatgctttctacttccggcttttccatctgtcctaagaactgtcttgcataggaagacagagactccatatagcgtctctggccttctgcatagatcgtatcaaacgccagagatgacttgccggagccggaaagaccggtgagaaccaccagttcattccttgggatatctacggatatatttttaagattatgttcatttgcgccgcgtatttttatatactgctttggcatggtatgactcctttttctgctgtttcctgaaaatatttactcacttctatacctggtttttccaggcaatataatgctgaaaagcgcagggaaaatttctccctgcgctttttagtataccacatccctatttatttatcaaacatttgttcgataaagttttttaatacagccggcgttttttcatacaaactggctttatttacacgttcccaacgggtatggatatctttcccccatggtccaaagagcatggaggggatctttaatttcgccattgcttctatatccatggcataggcactgccccataatggggtctgggctgcataggcagccagttcttctttgtccattccgccacagtagcttaagtcggaaatgccgcagaaatattcatggcatttcagggaaacattctccttctctgctgcttttttcatctctttaaaaagaatttttccctcttttccactgtctacagccggataaaatggaggtgcaaagccaaggatcatgatcggaccggagattcctgactggtttaacagctgctccataaaatcaagggtggctgatgggaagttggtctcgcctttgtccaggtgggctttctgagtcttgtaggcttctaaaagccaggcagtaaaggcttctccctgttctttgcggcagtatgccagcaactcactgactgtaagaacttctgcttctgcaacggcggctgcgctgggacatgccaggggattgccttcacttgtcagaccagctttttcttctggaacctctgctttttccacagccttccactgcgcttccattctccgggcatattcttcaaaactttcttttcccagttctttcaatcgctttatcacttcatccggcgttttttcaaacccaagcatgctcatgtatccaccagccctgaaaggcacggacacatcgtagccttctttccggtcacgaagacaaaaccaggttggcggtgggcagatttccgtagcacttttttctgcaaattccggtgccagttctgttttcatgaaaaagctgcttaaaactcctacagagctgacaccctggaaacagtttaatacatgggcctttacgccctggaccaatacagcaggcattgtttttccaacagaacctgtataaatggtctttgccccattttccatggaagccggttccagatcgatcagtgctgtatattccaggtcaaagcgttcttttaaatcatttaaaaatggcacagcatggcgcattccggcagagtagccttcttcatccggtactgttacgaacaggagatttccagatatttcaggcgtctcttctgttccagaagcagtttttgtctcaaaggcagccgtaccacactctttccgctctgcctcaaccaccagcttcccataccagtccagcagcgccagtccaacagaaagtccgcccttcatatctgcggtccctctgccaaacatccagtcaccagaaaggaaatcttttttcacttcctctggcataccaggcagagcatttccagattttaccagatcttcccatttttccacatcataagcaagagcacgctcatttccatactcttctgtgtccaccacgtcataatggcctgtaaggataatggtcttacgggatccgttccttccttttaccagtccccatggtacagaccggccaaagctgtcttccggcaggagatattttcctgtctgctccggatactccttaaagtaaggctgctttgccagctcctctgcaatatagtctgcgcagcttttttctgtctctgtattggaagtgctggggatttttaccagttctcttacataccgttcaattaattctctcatcgttcctcacggaaatatgccagtcccagacttgccggcggctgatattccctcttctttctcagactggtaaataccagtacaataatggttactacataaggcagtgccttaaagatctcctgtgccccgcggtccagtcccggaatataaagatacaggatataaaggccgccaaaaaggatagaaccccagatcgcatttacaggcttccagagagcgaagataacaagggcaattgccagccagcctctgtcaccaaaaccattattggtccaggttccgccggaatactccattacaaagtacagaccgccaaggccgctgataccgcctccgatgcaggttgccagatatttgtatacagtaacattaatacccgccgcatctgctgtagccgggctttcacctactgcccgcaggttcaggccctttttggtctttgaaagaaaaaatgccagcaccagagccagaataatggccagataagttaaaaatccataggaaaataataactgtcccactgcaccaagaccggaaagtacggggatctgcttcttaaaagctgcaccggtcactgcaacggagatctgtccaacaccgcctgccagcttggaaagagaaccgccgaagaagtttccaaaaccaacaccaaaagtcgtaagagccagaccggttacgttctgattggcacgtaaggtaattgtcagaacactgtagatcagaccgcctaaagcagcacataaaaacgcgcacaggaaggaaataagaactcccacagccccatttggcgcagcgctgctgttttcataaaggaaggcgccgatcagcccggcaatgccgcccatatacatcatcccaggaatacccaggttcaggtttccggatttttctgttaagatctcgcctaatgcgccatagaggataccaattccctgtccaatggctttttgcataaaaatgatcaataatcccatatgttcacctcctatttaccactctttttcccgcttctaaatcctactttgtagttgataaagaactcacaaccaaggataaagaacaggatgataccagtaatgatatccgatgcattttcatttaagttaaactgggacgcgatctgtcctgcgcccttttgcatgaacaccaggaagaaggataccaggatcattacaaaggtgttgaatttactcagccaggaaacgataatggctgtaaagcctctgcctcctgctgtactggtagaaatcgtatggcttgcgccgcctacaatgataaagcctgcaataccgcagatagcaccggacagagccatggtgcgaaggataacacgttttacattgatgcctgcatagcgggctgtattttcactttcgccaacaacagcgatctcatatccctgcttgctgtattttaagtaaatgaacatggcaacagtcagagccaggacgatcaccaggttccagccatagtccagaccgaaaagctgcgggatccaaccgccctttgtagaggaattaatggttcctactgagttggagccctttggattttcccagaaaataatacaataggtaatgacctgggtggcaacatagttcatcatcagggtaaacagtgtttcattggtattccagtaagccttgaaaaaggccgggatcacgccccagatcatggctgctgctgcactgccaaggaacataagagggaataataccactggaggaagggaatttcccagatagatcatcatagctgcggaagtaacaccgccgatcagcacctggccttctgcaccaatgttccagaaacgcattttaaatgccggggtaataccaactgcaatacataacagcaccagtgtatcacgaatggtcatccatgcacggcgcttggtaccaatggcaccgtcaaaaatgcccttatacacttcaataggattcaaaccggtcagagctacgatcacgcctgcacagaccaccagtgacaaaagcactgcgattatgcggatcagccagcttttccatgtttcaattccgtcacgcttggaaatatgcatcagaggctctttatttgtaactgtactcatttccttactcatcctgttcgcctcctgtctttgtcatcataagtccgatctcttcttttgtagctgttcttccatctacaataccgctgaccttgccgccgcaaagcaccagaatgcggtcgcaaagctccaggagcacatccaggtcttcccctacgcagatcaccgctgccccctgctttttctgctcatttaataagtggtaaatggtataggaagagttaatatccagaccgcgcaccggatatgctaccataagcacacggggattggatgagatctcacgtcctactaataccttctgtacatttccgccggaaagccgtccaacaggtgtggaaacaccgggcgttacgatctccagctctttgatcagctgctccgccatagcttttggcgttcttctgtctgtaaagaatgggatgccctttttatagccccggagcatcatattgtcagtcatgcccatggctgccaccaggcccattcccagacggtcctcaggaacaaaggaaagcttgatgcccagtttgcggatggccgccgggctcatgccggataaggtctcttctccgccttccggaggataataccggatggttccgccttccattggctgcagtcctgcaatggtctctaacagctctttctggccgcttcctgcaatacctgcaattcccaggatctcgccgctgtaagctgtaaatcctgcatcatccagtgtttttacaccttctttatctacgcaggtcacatgttccattaccagacgtttctgtggatttaccggttccggacgctcaatatttaaggcaaccttcttgcctaccatcatctctgtaagggacgcttctgtggcatcttttgtctggactgtaccaatataggcaccttttcgcagaacagatacccggtcagaaagggataatacttcatgaagcttatgggtgataatgataatggaatgaccggcttcacgcatattgcggagaacagtaaacagcttttctgtctcctgtggggtcagaacagctgtaggctcatccaggatcaggatatccacccctctgtacaacaatttcacgatctctacggtctgtttctgtgaaacggacatagtgtagatcttctggttggggtccagatcaaagccataacggctggtcagttcattgatctttgccgcaacgcttttcatatccagaacttcttttccaggaagtcccaagataatgttttctgctgcagtcagtacatctaccagtttaaaatgctggtggatcataccgatgcctaaggcaaaggagtcttttggagaacggatggtcacctcttttccatttaccaggatctgtccttcatccggatagtagataccggatatcatattcataagagtggtctttccacttccgttttctcccagaatggataatatctctcccttctttacggacagacatactttgtcgttggctgttactttgccaaaccgttttgtgatgtttttcagctcaatggcatatgtttcgctcaccaggcaagacctcctttttcagtgctgtgtttatatttttgtgtgggtctgtgctgctatttcgcgggtacatactcaagaagcggagccagacaaagggtgactccgcttccaaaacgttactctaaaagagcagctttatgatttgacttattagttgtcaatggttgtgataccgtcgatgaggatatcaaatgctggtgcagaagcaaattcggactcatggaagtatccgtcagaaatgtattcaatgtcgcttccgtctttcttgtaggtatctaatgtctcaccatttacagtccatgtagaagtatcaaatacatgaagttcgccgcttgctaacttagcttctacttcttctactttttccttagttccaggagcaactgccttgtcatttaattccgttacaagaactgcgccgtcagagaagcccttgcaccagtcagcaggaatttctgttccgtccagtacagactgtacagcgtaggtcatgtaaatgccccagttgttgcttgcagaagtaagtgcctggtcaggagcagttgcgatcatggaaatgttgtaacctacacaaggaactcccgctgcctcgcaggctgttggagcaccggttgtatctgcatgctggctgatcagtacgcagccgtcagaaatcagagcgtctgctgcttctttctccagatcgaagcttgcccagctgttagtgtatttaacttccatggtagcggatgggcatacagaacgtacacctaagaagaaggaggtgtaaccactgataacctcagcatatggataagcgcctacataaccgatcttgcaggcatcttcttttacagtgccatcttcgatcatctgatttaacttaaggcctgcaactacaccagatacgtagcgtgcctcaaaaatagatgtgaagaagttgtgcatattggaaagtccgctgcctgctgcctggaaaccggttgcgtgacagaactgaacttccggatattcttttgctgcttctattacataagactcatgaccaaagctgtttgcaaatacgatctggcatccctggtcagctaagtccattgctgcgtcttttgctgtttcatcttccgggatgttccattttacgatcagctgatcgtcatttaatcctaatgcttcctgcatttcttttgcgcccttgtaatgagcggctgtgtaaccttcgttttcatcaccgatgaaaataaagccaacttttaaatcttcttttgctacgccttcaccggtagctgcttctgagccttctgctgcagcagtggtctcttctgccttggagtcagctgccggagctgctgttgtttcctgtgtagaaccgcctccacatgctgttaatgagagcgccataacacctgctaatgctgcactgatgatcttctttcccttcataatacatctcctccatttgatgatatatgatcactaaagtctcaaatacagactttattatagcatgctctcttaagttgtcaataatctttatatttttctgacactttttttacaattacacaattttcattataaagtcacacttattaatatttataagtgaccatttattaattaactccacaggaccgttctttaaagacctcacacataatacctgctccaatacgaaatccatcacagaaggactggcgtttttcaagatatgttaattccaggtaggtgtctaatatgttctgaaattctttccggttttctttgtccagcttttctgtaaaattttctatttctttcagggatcttctgcaaagtgtctcgtattcttcgtttccttctatttttaattctgcgggaacaagttcccctgcatacagctgttctaatatgtttttcatgcccctgcctccttttgtttttagaatagcacagccctgtcgcaaatgcaatcgaacaaaatcttacgattgcaaatgtgacgaagctatatcatgatgtattattatattgggatttagttcaatagggtccaaaatggctcttccatgtataaacgcattcacggcaattttgtccattttgctccgccgccgattaggcaggtcttcggcaaactcgctcactgcgttcgctcaaacagtgcctccaacctgccagctatgctcacaaaatggacaaaattgcctaccgaatgcttttatacatggaagagccatttctactgtattggatatgtcacataaaaaatgccgtacttatgtacaatccccctcctacatgaaaactgcttattggtttgctcctacattttttattgtcaataacgtagaaagccgccggtgcacattacagaataagcatttgtttgaaaatccgtgagtgggcgcgcatagcgtcagaacggagaaccactgtttgagcacacaaagcgtgcgagtttggttcgcagttctgacaataggcgacgcaagcccacgaacaaaggattttctcccaaatgcgcatctgtaatgcgtaccgacggctttcggacccttcggaaatctttcagaccttagtcgattaaatcctaatttacatctgcgtcatttttttcataaatctccataaattcttctcctgtgatggtctccttatccagaagatattttgcaatctcatgaagcttatcttcgttttctttcaggatatttaatgccttttcatgctgggtacggacgatctttactacctgctcatcgatcattctggctgtttcaggggaacaggttaaagaggtgtctccgcctaaatactggttgtttaccgtttccattgctaccatatcaaattcatcggtcatgccgtaacgggtgaccatggctctggcgatcttggtagcctgttcaatatcattggacgcgcctgtggtaatggaatggaagatcagctcttcggctgcacgaccgccggtaaaggttgcgatcttatttaatgcttcttctttgctcatcaggtatttttcaccagcgtctacctgcatggtatagcctaaagcaccagaggttcttgggataatcgtgatcttctgtaccggagcactgtgggtctggcaggcagctaccaatgcatgtcctacttcgtggtaagctacgatctttcgctcgtctgcagggatcacagcatttttcttctggtaacctgcaataacggtttctacgctttcctgaagatcttcctgggataccaggtttctgccctgacggacggctcttaaagctgcttcgttaatgatatttgcaagttcagcaccgctggcacctgctgtagatctggcgatcacgttgtaatcaacagactcatccatttttaccttgcggccatggacctttaagatagcttcacgcccctgaagatccggaagttctaccggcacacggcggtcaaaacgtcccgggcggagaagcgccggatcaagggactcaggacggttggtagctgctaagataacaacgcctttctttccgtcgaaaccatccatttctgtaagcagctggtttaaggtctgttcccgctcatcgtttccgcccattccgccgccgtcacgctttttaccaatggtatcgatttcatcgatgaagacgatacatggtgctttttcgttggcctgcttgaataagtctcttactttggctgcgcccattcctacgaacatttctacgaattcggatccggaaatggagaagaatggtactttggcttcgcctgctactgcttttgctaaaagagttttaccggttcctggagggcctacaagtaaagcgccctttggaaggcttgcaccgatctgtgcgtatttatccgggttatgcaagaagtctacgatctcttttaaggcgtctttggcttcttcttcccctgctacatcattaaaggttacacctgtttctttttctgcgtatatttttgcgttggattttccaaaagtcattgcactgcttccaccgcccatacgcttggccatcatacggcccataagctgaccaatgatcacaaacataaggatcgggaatacccaggtggtcaggaagttaagtaatggggatgcctgagtggggatctctctgctgtaattctggactcctgcgctttccagacggtttaccaggtcatctgcagtggtcatgtttcctgttttataggtaaccgcagaccacggtttgtttttatcctcatttaatgtatacaaaatttctgtatagtcactgttgacgtagacctgttctacgtttcctgaacttaactgtgtggtgaactcattaaatggtacttctacggaacgctccatgacagatggaaatactaatgcgtttaataccattacaatgagaaggacgatacagtagtagtataaatagggttttctgttattgttattgctgctgttgtcgttttttacgcccattgtgttttctccttctattttgttttattttgattttgatcttttcgcgattgcctgtgtttttcgctttcttgatgataaaataaacccgcttccaggttttgtcaatagaaaatagtaaatttttatttacttttaataattattgacatttcatatttgttgtggtaccgtttgttatatggaaccatataaaaaacacatcaggacaggaaggagacttttttatggttgatcagcaggagctttcttctgcgggcttaaagtttatggattttgccatccgtttttttaatatggccaaatgccagtaccaacagcagaaccaggtgaaagcgaataaagcgggatttcaggtcctttttattttaagtatgcccgaatatacgcagcctactatgagttttctggctgatgaaatgggaattacaaagcagcagctgacaaagctggtgaatgatctggaagccatggggctggtgaagaggattcatgatgagaggaaccggcggcaggtttatgtgactttgacggatgatggcaggaatgaatttgaggaaataaagcaggcgatgttagagtgtacggtggctgggcttaaggacttttcggaggatgagctggagcagctgggggattgccttgaaaggctgatcccgttgttggagaaattcaggggaaactgctaatttaagctgggctacagatatatataaccacctcaaaattgcaaccaatttacctttttgagcatgtgattttatttttataatgtgccttgcacccaccgcgccgccaggcgcggttcaatcatacataaaaaaatgagtgtcaacaaagcttcatctgttgacactcattttttacagcaccttacttaagaaagacttcaggcgctcatttttaggatttgagaagaactcttccggtgcggcttcttccatgaagtaaccgccgtccatgaacatgactctggtagcaacttctcttgcgaagcccatttcgtgggttaccactaccatggtcattttttcagcggccaggtcacgcattacgtttaatacctcgcctaccatttccgggtcgagagcggaagtcggctcatcgaagagcattacgtctggcttcatgcagagggctcttacaatggcgatacgctgtttctgaccaccggataactggcttggatatgcatgggctctgtcagcaaggccgacacgctctaaaaggcgcatagcctctgcttctgcctcctgctggctcttgccctgaagcttcataggcgccagtgtcaggtttttcatgatatccatatgcgggaacaggttgaactgctggaataccattcccattttctgacggtgtttgtcaatatcggttttcggatctgtaatatcggtaccttcaaaatagatatggccttttgtaggctcttccagacggtttaagcagcgtaagaaggtacttttaccggaaccggatggtcctactacaaatactacatcacctttgtagatatccactgtgatatcttttaatacttcgatgtttccaaagctctttccaaggttctgcacctggatcagaggctctcttttttcattaccgctcactctgacgcagcctcctttccagaatctggatcagttttgtgaagatcataacaataaccagataaaccagtgcaactgcgatcaatggcatgaacgcactgtaggttctgcttcggatgatatcgccgcctttggtaagatcctggattgcgatgtaaccggaaacagaggtctcttttaacagagaaatgaactcgttacacagagttggcagtacggttttgaatgcctgaggcatgatcacgtaccacatggtctgagcgtagttaaagccaaggcttcgtcctgcttccatctgtcccggatcaattgacatgataccgcttcggaaaatttctgccacataagcgccggagttgatgccgaatgccatgatcgctaccggtactttatcaatacgtgtgcttccaaatacaacaaaatagatgatcagcagctgaacaactacaggtgtaccgcggataactgtcaggtagatcttgcacagaatattcagcagttttaagtttcctgttttatcgtgggtagaacggatcatacctacgataaatcccagaacaatgcccatcatgcaggcaaagaaggttatgatcagtgtggtcttaagaccatctgcaatataatgccaccgatcatctgaaataaaattcagataaaatgcatctgtaaaatttttccacatgccgatcatccttttctctctaaatacttgtttctaacgactattgattactctgccttgatgtacttagctacgatctcgtccagagttccgttgtcctttaaggtctctaatgcgccgtttactttgtcaagcagctcggtgttgcccttctttacagcgattgcatactcttctacagtaaatgcttcgtctaagatctttaagccttctgtttcagatacgaaagtctttgctggctcaccatcgataacaactgcatcgatcttgccctggcttaatgcctgaacagcttcaaagcccttgttgtaacgctctacagtggttccgtctgcttccagatcagatacataaatgtcaccggtagttcctaactgaacaccaacagtaactccctttaagtcatctggaccagcgatctcgctgtcttccttaacgatgatcatctgggaagcagttgcataagtatcagagaaatctacagatgccttacggtcttcagttacagtcataccagctaaagccatatcagccttaccggatacgatctctgggataatggagtcaaatgcgatatcttcaatctctaattccataccaagctcatcagcaatagcctgtgcgatctcagcgtcgatacctacgatcttgtctccgtcatggaactcgtatggtgggaactcagcgttggttgccataaccagtttgccgcctgctgcttcctttgactcagctgctgtactctctgctgcagtggattcttcttttgctgctgcagttgtatctgctgctgcagctgctgttgtctcttttgcggaaccgccgcatgcggttaaggatgctgccataagagcagccattgtcagtgcgattactctttttttcataatgttttctcctcttgcatgtttatgcatattattatgtttgctccctctatggtgggaaagctgtctgttctattataatgctttttttctttttagcaagagtaaatttatacatagggtttatggggtttatgcaactctatatataattttactttctgagagctgcctgtaccaggtgtttggcaagaacggcagtggtaactgcgcctacgcctcccggaacaggtgtaagttttccagatttttcctctaaagtttcagcagctacatcaccgcaaagttttccattttcatctacgttaatgcctacatcgatcacagtagtattttcacctacataggaggcatctaacatttttgcctttcctgcagctgctaccaggatctcagcctgtttgcaggtgcctggaaggtctttggtgcgggtgtggcagatggtgactgtggcattttcttttaaaaggagcatggacagaggacggcctacaaccatgctgcggcctacgatcgctgctctttttccttccatagaaatgtcatatgcctttaatacttcgatcactgcctctgctgtacatggtgcaaatccggtagagtctccggagaatacttttgcaatatttaccggtgaaatgccatccaggtcctttttcgggtcgatcatggcttcaatgtctttttcacagatctgctttggaagaggacgaaggagaaggataccgcttacatccgggtcttcgttgatagcggtaaattcttttttgaatgcttcgtctgtgatgtcagctggaaatgtatagcactgggagcggagtccgaatgcatccattttctttacagctcctctttcataggacatatcatctggattttctcctacgcgaatgatagccagctttggtgccggtccgtttattttttcaagcattgcccctacttcttctttgatctttgcggaaacaggtgcgcctttgattaattccatgttaattttctccttttatgattatataagctgtgccaggactttttcgtagatctcatctgcctgggaagtgccgatcttgatcatgcgttttgccttctggttgatctcttctgctttttcacgattttttatggatttcgtgtttatatatacattcatgacagctccaagaagcgctgtacgggtaaactgtacagctacgcctacatcgctgactgccatgcggcttcctttatctgccaggacgtctaaaatttctaagagttccagtgatttttccatgatctctactggaaccatgctggcatctaacagcttttcttccataacggcatctttgtgctctttttcttccggggtggcggatggcaggcggtaacattctgccaacggcgcaaatacttctgcgtcacggtcggagaagtgcaggaattcctgctgcatgttctttaaatcagtcaggtatttctgcatctcctcttctacttctgcgtattttttctttcctaccgtcagatttactaccatctgtcccagggcatttcccagtgctcctgctaaagcggatgctccgccgcctcccggaaccggtgccttagatgaaagaacctccaggtactcacttatctttttctcttctgtcattttttctcctcaataatctctgtgtgctgtctgcacagcagacatgttgaaaccacctgtgaaaaacacgggatgcgtattttgtttcctacgttttaccttattcctcagccttgacaatcacgtcttttgtcagatccttgatcacttctcctgcaatgatcaggcctaccacggacggcacaaatgcagtacttcccggaatatcccggcgttcagtacatttatgagctgcacctggcgggcagatgcagtggtttctgcaactgatggccatatcgttgatcggtcttgtaggctgctcctcggagtaaaccacctttaatttctttacgcctctttttttcagctcccggcgcataacttttgccaacgggcagacttttgttttgtaaatgtcagctacacggaacatggtaggatctaatttatttccggcgcccatggagctgatgatgggaactcctttttcttttgctttcattaccagttccagcttggctgtaacggtatctactgcgtctacgatatagtcgtaatcttcaaatggaaattcgtctgcgttttccggcaggaagaagcatttgtggatctctacctttacgtccgggttgatctccagcatacgttctttcatcacttctgccttgtattttcctacagttttgcgggttgcaatgatctggcggtttaagttggtcaggcatactttatcgtcatcgatcaggtcgaatgcgcctactccgcttcgcaccagtgcttcacaggtataaccgcctactccgccgatgccaaatactgctacacgggaagaagccagcttttccattgccgctttgccaaataataattctgttcttgaaaactgatttaacatgcatttttcctctttatctgtcactcacttgtcagtagtatcatgctgttggtcatacagtgcacaaacagtgcacagaccataactattacttaaaaaatgatacttcatacccgctgtcttgtcaattggcaaacctttgggtataatagtcataactaactgcagatcaaatccaaaagaggtgtatacaaacatgaatccaatgaattttcttgctttaaaaccatcctgggaaaaatttcggaccaatcacccgaaaatgatctcctttgtgaaaacagcttccagggaaagctttttagatgaaggcagtctgatcgagatcaaggtcaccaacagcagcggaaaaaccatggctgccaatatccgtgtgaaaaaagatgatattgagtttttaggaggcttaaaaaatgcgctggagaagtaatttccccggcgtattttttaatattttttcttacatttttttacattttaatgaaatgtatatattctttgatttttatatggtaaaattcagatacaaaatattattttacttgaagctgccagttggatatcacggcagtgtcagaaaggagttcctatgttagaactgatcctctattttggtcctgttatcctggttgtccttctggtgcttcttattataacccagggatacgtaaaagctccaccggatcacgcctatattatctccggtctcagaaaagagccccgggtgctggtaggccgcgccggtctgaaactgcctttctttgagcagcttgataagctttatcttggccagatcaccgttgacattaaaacagatgagtacattcctactaatgattttatcaatgttatggtggacgctgttgcaaaggtacgtgtggcagatgacccggccatgttaaaactggctatgcgaaatttcttaaataagaattctgccaagatcgccgctgatctgcaggactctcttcagggtaatatgcgagagatcatcggtacgttgactctgcgtgcgatcaatacagaccgtgactctttctcagatcaggttatggcaaaggcttctaaggatatggagaagctgggaattgagatcctttcctgcaatatccagaatgtaacagatgaacatggcctgatccaggatcttggtatggataatacttctaagatccgcaaggacgcttccattgcaaaggcggaggcagaacgtgatattgccattgcccaggctgctgcagataaggcttccaatgaggcaagagttctggcagaaacagagattgcacagaagaataatgaactggctattaaaaaggcggaattacagaaggcttctgataccaaaaaggcggaagcagacgctgcttatgagatccagaagcaggaacagcaaaagaccatccaggctgctactgttaacgcacagatcgccaaggcggaacgtgaagcagaactgcgcagacaggaggttgctgtacagcagcaggcattggaagctgagatcaataagaaagcggatgctgaccgttatgccattgagcaggctgctgccgctgacctgacccgccgccagcgagaggcagaggcgaagaaatacgagcaggagaaagaagcggaggcacgaaaagcacaggcagaagcacagaaatacgccatgctccaggaagcagaaggtatccgggcgagaggtgaagcagaagctgccgctatccaggcaaaggctttagcagaagcagaaggtatggaaaagaaagcccaggcttaccagaagtacaaccacgctgctatggcagaaatgatgatgaaagtccttcctgaaattgccggaaagatcgcagaaccattatcccagatcgacaagatcaccattatcggcggtggaaatgggtctgatgacggtgttggcaacgttgcaggcaatgtgcctgtggttatggcaaagctgtttgagtccatgaaagaggctacaggcgttgacctggctgagatcatgaaagcagatacatatgatgccaaggtgaccaggaatattaacctgaacggggcagaggatgccttgaagcaggtgatcgctgctgatacagctcccgctgacaaacctgttgctgaaaatggggcaactgctgataccagttctgccacagtgaattcctgaccacatttgtatggattttttgttcaaaaatgggttgctgcacataaacacagcaacccatttttttatattatttttttaaccctactgtatttaattcgccttcactttttgctactacaactgctgcggcagcatcacctacaatattaggaataactcgtgccatgttcaaaatgcggtcaataccagctaacaggccaattgtttccaatggcagatgtactgcattcaagacaatagtcagcatcaccagaccggaaccagggatacctgctgttcctacggaagctaaaactgctgttaccatgaccatgatctgctgggtcagtgttaattgaatgccaaaaacctgtgatgcaaaaataactgctactgcctcataaattgctgttccattcatattcataactgcaccgaatggaataacaaaatctgcaatcttatcactgacacctaactctttcgtgcattttaagtttaatggtatcgttgccacactggagcaggttgcaaatacaaaaagcattgcttctttcatgaccgagaaaaaacggaccggactgatcccgccgtacagaccagccattaatccaccttgtacaaaaacggtaaataatgcacaggtaatataacatgcagcaattgttttcatataaggaagcataacacccataccatatttaccaacaatatttgccatcagaccaaatacgccatatggtgtaaattccagaacaatgttcgtaatttccttccatgcctctgtccatgcacggaagaaattcagaacaggttctcctttttctcccagtttgatcaaagcaaagcctaacaataatgagaaaaagatgatctgaagcagattttgtgtgcttaaagaattaaatggattggttggaataatgtccatcagagtatctacaatacttgggatttcttttgcatcataggcctgcgctgactccatcacaaatccagcgccaatctgcatgatattacataaaacaagaccaatagcaacagctattgcagtaccgccaagaaaaattcctaatgtctttcctccaatttttcctaatgttttaaaatcctttacatctgctgccgaacatatcaaaagtcccagcaccaatggtgcaactaccatagtcagcagacgggtcaatatagttccaagaaatgccagctttgttgctttctctccaaaaataagtcctgctgcaataccaagaacaaatcccaccataattctggtgaataatcctaactggttccatttttttattggattcatatgtatgtccccccgttttttatacaaatctgcatacatggtctaccgcaatatcagaaaatccatacgcctctgcctttgtcagttttccgttgcagacctgaacaatctcatctaaaagcatttttccgctttcttcaattgtcttcgtaccctcaatgatcccgcttaaatccacatccatgttatcttccatgtgcgtataagtccgtttattggctgttacttttaaaactggcgcaatagcatttcctgttggtgttccgcgtccggttgtaaatatgacgcaggcacatccggctgctaccatggatgtaacagaagagatgtcatatcctgctgtatccataacaatggcaccatgtttgctcgggcgtaccgcctgctccaaaacttcaacgatcggccttgttccgcctttacggatacatccaagactcttttcatccagtgtagaaaggcctcctgctttgtttccaggtgttggctgtcctgcgcggcagtcctgtcctgcctgttttaaatgtttctcatattcttcacagacacggatcacctgattgtggatcttaggtgttgctcctcgttttgccacaatatgttctccaccgatccattcaatagactcactcatgatcgtagatgcaccaagatccactaaaagatcacttaactctcctactgccggattggaagcaattccagatgtagcatctgatccgccacattcaattcccataatcagttcagaaatatcgcaccattcttttcttacgagaccagcctgtgctgccagttctcttgctgctcttgtagccttttcaatggtctttaaggtaccgccttcttcctggattccgaaagacactactggcttatctgtcatcttctggatcttttctcttaactgcttatgtcctaccgtttcacatccaagaccgatgatcacgactccgtatacatttgggttacaggcaaaaccagttaatatcttctgagacatggctgtattatctgccacatctgaacatcccgtattaaatacaatatttacagcccctcttacctggcttgcaacaatacggcttgactcacttccgcaggcacaggctggaaggatcagtacatggttgcggatccccactcttccgtcagaacggcggtatcccagaaactggatcttttctcccttttctgattttttaatctcaacaggctcttctcccttttcttctaccagttcgctttcatagtcacggggcacgctgtaaatattgttatgatctaccagacatcctgcattgatctttcttgtagtctttccgatcagctctccatatttgataacttcctgtccttcctccagatctgtcagtgagatcttatgggaaaatgggattgcctcttttgctaaaatttccagatcctcatttttgctgcggtaatgtaccacttcccctgcttttacatctcttacacaggttactacattgtcttttggatccatgatcagtgcatctaccttcatattctttcctcctgctacattcatttttttgctcatctgtatctcttgacatcagtatagatctgctatatgataaaatcaattttatggtttttatattattataaattgaatttatacacaaaaggagattccatgcagccggaaatgaaatatatttacactgtttatcaatgcggaagcttttcaaaagcagccgaaaagcttttcctaacccagcctgctttaagcatttccgttcaaaaagtagaacatgaagtaggaatgcccttattcaaccgggacaaaaagcccttggaaataactgaagccggcatgatctatattcaaaaaattgaacagatccagcatttagagcaggagcttgccatgcagctgaatgacctgactgatctgaaaacaggacatctgcgtgttggcggaactcattattttaatgcctatattcttccccctgttattgcagcttacaaaaaaaagttcccggggatcagtcttcaacttattgaagctggttcctgggaactgattgatatgttaaaaaatgacaaaatagacttaacctttaattgtactcctgatccttctgataaactgcgtcgttctccttcctttcaggatacgatcctgttagctgttccaagccatttttctgtaaaccgttttttcactaaaacagccctttcttctcaggatgtcctggcacgtaaatttgaggatccggactgcccttctattactttacaagcgtttacagatacaccttttattttgcttactccaggcaacaatcttcgtaaacggagtatgactttttttaaagaagcaggaataactcccaatatcaccatggaggtatcacagttggtaacctcttatcatctggccagatccgggatcggggcagcttttatcagtgactggatgctgactaacgcacacccagaaatgtcttattataagatcaattctcctgcttctgcgcggttatttgatatcgttacttcaggtaagaattatttatccaaagcccaaaaggcctttattgatctttttcaggcttattataaaaattatatctattgatctgacgtatccagatcatctgcttctggttcttcctgaactaacttttcctggactgatccttcctggattgtttcttccggctcttcactgccatcctttaacttccagcgaaggatcaccctgaacaggtctccttctacctctatcttcatggtgccgccctggacttcggtaaagcttcttgcaatggcaagaccaagaccggagccttctgtatttctggacgcatcccctcttacaaaacgttctgtcagctcttccggtgagatcttcagttcttctgcggagatgtttcgcaatgttacctgtacatattctccgtctttttctgccttaatataggccctggtgcctttcatgccatacttggtgatgttcaccaggagattttcaaagatacggcaggtcttctggccgtctaaggacgccgccaggcgctcatttggcaggtcaaaatggaactgaatgccgctggcttctattttatcggaaagttcaaaatggacctgttttaacaggctgaccacatctacctcttctggatgaaggactacggtaccgtttgccgccttgcttacctcaaacaggtcttcgatcagctcttttaagcgcatggatttctggtctaagatctggatgtaggagtttcgttcttcttcggtaatattttcctgctttaacaggtttacataagtaataatggcagtcaatggtgtttttaagtcgtgggaaacattggtgatcagctcggttttggtgcgctcgcttttcacctctttttccactgcttttttgaagccttcctgcaccttaaacagctggtttttaaatggctcaaaaattcctaagtcttcttcttcttttacgtccagattgccttctgccatttcctggatgcagttaaggagtctgtggtatttttcctgcacctttccccagtatttcttcagcaggaagaataatgcaatagagtaaaggatcagcgcgccgatgccccagaaccacagcagggagatgcatgcaaggatcacaaagtttgcaagcactgcctttccgatgatcttgctggacctgctttcccagtctgtctgggagaacagatccagacctgtgcatacccagtgtttgcagaagcaaaggaattttccaacccaggtgcgctctttaaagtagcgccatggtcctaaactgaagaaggaacgtaaattagtaactccccagtaaaacattccgtaaatgaccacccagaacaggaaattagctgcaacggccagagcattggccataaatggtaaaaagcctgcttttgccagctctgcctggagagttcccgccataaagctgcgtactatacctaacgggatctccatatttaagaaaagcagcagccagcccactccgataacgcaaagaggctcaagtgaccagctgaatattttcattttgaccacttccattcccgggataaaagggataagaagtgctgccaccaggactgccatgcttacatatgcaacaacggtgataaatccatgaccgctttgataatcataattatcataagcatatgcattccgtggcttttcctcattccagcttccaagctgggtcggctgacaccggaatttgatggtcatatttttcggaccactgaattccagaccagatctgcggtagctgttattaagtcttgcagccaggggatcataaaactcaaaacggccaatggaacggatcagaccggagcagttgctttcaagacctgttacacctgacacagtcagtctgccattttcatcaaaatgtacggtaaactgaagttcattgtctgctactgtccgggaaaatatttcctcaggagcacttacattgctgcgcaggtagccgccctgtgggtccatgaccgcataggagatacgttcattgtactggttataaagattattccagctggttcccagttcatcgatcagatctgttatttcttctctgagagccggaatgtcttcttctgtttctgtaacatatgcaccataaacttcttcgtctgtaacttctgcgttctcactttcatctgtctgctgttctgaaagggatggatcggctgcagccccatcggtcactgcatctgtattttctgtggcatctgcaccggctgctgtatggtccgtgtccggtgtttccggcacattctgcgcatctgtcgtatccagaatagccccggccccatctcctgtgagaaatgtctgggaataagtaaggataccaccattttcttcctgtttttgctgatgccagagaacgtagctgaaattcatcacctgggtggtcagatttccgaacccgcctgctgcttctgtttcctgcctgcggttcctgctgttgaattctgcagctttctcttccatatagggatatagccccaccgtagcacctgccgcaataaaaaccgtcagtatcatggctataattcccagaattttccaattatgatttttctttacaacatttccgtttgtaacattttcatttccagcatttttcatttccagatcatcattgtttttcaagtttgtatccaacaccccacaccacctttatgtatttcggatcttttggatccacttcgattttttcacggaggttgcgtatatggaccatgacagtatctgtgttgatggcacgttcgttccatactctttcgtagatctcttctgccgggaaaactcttcccggattgcggatgagaaggagaaggatcttgaattcaatgggagtcacttttacatttttaccgtctgcattgacttccactgtttcctcattgacttccagtccgcccacctggtggatctttggattttccttctgcccggaatttaaccggtctaagaaacggtgatatctgcgcagctgggagttgactcttgccatcagttccatgggagtaaatggctttgtcacatagtcatctgctcctatgttgagtcccaggatcttatctacctcttctgtctttgccgaaaggaagatcaccggaaagtcatatttttcccgcagtttcgcagtcatggtgataccgtccattaccggcatcatcacatctacgattgccaggtcgataggcctttcttccaggagctttaagccttcaaggccgttttctgcctgaaatacctggtatccctggctgcgcaggaaaatttccactccctggcgtatttctttgtcatcctctactaaaaggatactgtctccgttcatatactcatttcctccttacggtttatatagtagcaatgaatttgaaagaggcgcttcataaaaaatgaaagtttttctaaagaattatatcacagtagggcttctcccgccagtaggcggggagaatgcaaaaaaggaccacccggcgcggcccgcaggccacaccagagcagtccctttttcacattttcccagatttttccagatcctgttttcccaggatttacataatatcctgatgcatcagatgcttaattctctcctcattcagtcccttgataacctcaactgccatgcggacggtgctttctacatcttcgatagcacagaaattatagtggctgtgtacataacggcttggaatgccaagtaccagggttggtacggcttttcctgcaaggctgatcttgcctgcgttggtgctgccgcctcttcttactgcgtcctggtaggtgatacccatggtatcgcccagttcatgtgcatactctaagaatgcaggattggtaatataactcttatccatgcagcggatctgtacgcctttatgcatgccgccctgggatttttcagggctgtagtagaagtcgtctgcaggagagccctcaaatacgatagccagatccggctgtacctgtgcagaagtaacggttgcacctctcataccaacctcttcctgggaagcgaatgctcctactacttctactgccaggtcatcttttactgcctgtaatgctcttaatgtgtggatgatgcaggcacagcccatacggttgtcaaaggccttgccaaagcataatccatgctcttcatcatactcgaatgcaacttccggagcagccggatcaccgatattgataccgaagctttccattgcctcttttttgctgcatgcgcctacatctaggaacatttcacggatgtcaagcggtgcgctcttttctttatccgtcataaaatgcaccggacgggaggtggtgatgccctttaccagctttccggctctggtgcgtaccagtaaggtatgtgccgggatacttggcaagtccattccacctaacatgatcaggcttaacagaccattttccatgatcccctgtaccataaagccacactcatctgtatgggcatccagcatcagcaccggcttttttccatttgcatttccgccgattcttgcgtatacattattcatggcatcgttggtcaggctcatgcctgtgcagtggtcccttaccgcccttactacatcttcctcaaatccgcttgggccaaaggcattggtcaggtcctttaatacattgatatcaatcatgttcatatgttcctcttacaagaagagttcctccttccatcatcttacggccgcctgcaatgacggtatctaaggttaagtcatctttgatcagcaggatgtctgcgtcagcacctgccacgatatgaccctttttcttctcgatctccagcgctttggcaacattggatgtaaaataggtcagtgcctcagcaaagtcaaagccgcctctggtaactaaagaacacatctgtgcatacatatttcccacatccgtaacaccgatctcttttaacatgcctgcctcatcgtagctggaccagcttccctgaccgtcagagctgaaggtaatgtgatccataggaacatctgctgcctttgcctcttcaagaagtgcaggcattggatcatgtccgatgactggctcgccatttacaaagtcttcacaggtaatgtcaatataaccgcccatttttgccagcttcagtccatccagatacagttcatggttgcggctcatatgagtaggctggaaggtctttacaggaatatcagtctcagccagtgcctcaaatacaggccctaatttcttctttccgcttcccatatgtaaaacgataaatccaggctttccgccgatcatgcctgcagtacgcacatcacttcctaaacggatcagctcatctacagagatatttggtgccctgtggtcagaaagagccagtttcaagcccatgatctcgtctacaaaggcaatatccttctttacacttcctgttaaggtcaccggcggataaccgtaggcaccgcagagagcataagcagtaatgccttcttcctttaatgcctttaccttcgctaacaggttttccacactgcgggacatatcatctgttccaagaagccctaaaacagtggtgataccagcctttaaaatagaagaaagctcaacctgtggagttcttgtatggaagcttccttctccgccgccgcctgttacatgaacatggcggtcaataagaccaggtgttaagcgcattccctttgcgtcgatgacctgacagccggtacctccttccaggttatctcctactgcttcgatctttcctccgcacactaaaacatccttgataccaaggtgttccggtgcgtatacatcagcctgtttcaataatatcatggttatattttctcctaaaatatattatatgttctctcggaatctttctgtacctgattttgtgagaagattttttgtcagttgtacccaaatttctgaggcgtacgcggtgcgtacgttgatgaaattcgggtgcgactggcggaaaatcggccacaaaggcaggtgcaggaaagactccgagaggacatccaaattttccagacgcagctgcgtccggaccggatatccatcttttacttttctttgtagaagtccggtacgactttttcatggtactctgctgccgcctgacgaaggctttcatctaacagcaggtcaagaccggtcattgccagtccctgtgcccccttgatgcagatctcatctgcagccggttctgctgctgctttggcatattctttggaatgtgccgggatctcttcatctgtaatagacaggtaatcgtggattgccgggatcttaatagacacatttccaatgtcagaagaaccaaaaagcagttttggatccggcaggcacatgctgatacctacacgggccatattttccttaaaatcttcacagatgggcagacatggataacgctctgcatagatcggttctgactggatctgtacctttgcacctgtaaggctttctgcacgttttgcacagccgatgatcatgttctgaagctcatcaatacgcttcatggtagccgcacggatacagaactccgatttggaaaatcccggaattacgttagaagcagttccgccctctaaaataacaccgtttacattgtcctctgtttcaaataacggacgcagcatatcgatctggttaaacacgctgatagccgctgtcagggcattgatgccagttgccggtgcagaggaatgggcagactgtcctgtaaaggaaatggtaagacttccggaagctcttccgttccggttaatatagttcctgctttcaccgccacaggtgggatggatcatcagtgcaaaatccactccatcaaagccgccccgttccagcataatagcctttccggcacctccttcttctgcaggagttccaatgatccttacttctcctgcaattcccatttccacaaatatttttgccagagaagcaaatgcaccggaagcacaggtggcgatcacattgtggccgcagccatgtcctacgcctcttaaagcatcatattctgctaaaaacgccactaccgggccttttcctgttccttttttcactgccttaaaggatgttggaaggtcacaatagcctctttctgtttcaaatccctgtttttccaggaaatcacatatcttggcagatgatttaaactcctgaaaaccgatctccggctcatcatggatgctatgggaaagctgtatcagctgcggtcttaaccgttctgcttcctcacagatctttttcttccattcatccacagaaatcccttttatttctgtcatgatccacacctccaaaaaataaaatgtgtatacaaaaagctgcagacgtatccaaatggcgcctgcagccttacttaattacaacttaaagcagatgacaagcagccatatgtcctggttctacttcacgcagcaccggcttttcctgacggcagcggtcggtagcatatgggcatcggtcgctgaaataacagccctttggaaggtttacagggcttgggatctctccctttgcatcaattccctgaaccagcggcttttcgcctacagtaggaactgctgcaaacagcaccttggtatacggatgtaccggattggtgaaaagggtgtgtttatctcccatttccacaatacttcccagatacataacgcccagtctgtcactgatgtggcgtacaactgataagtcatgtgcaataaacagataagagaaattaaattcatctttcagatccattaacaggtttaagatctgggcctgaatggatacgtccagagcggataccggctcatcggcaatgatgaactccggatttacagctaaggctcttgcaataccaatacgctgtctctgtccgccggagaactgatgaggatatcttccagcctgctccggtcttaaaccaacacgggctaaaatactcatgcagcgttctcttgcttcttctttggtctttgcaatgccatggaacagaagaggttccataatgatgtcagcaactctctgtctcggatttaaggatgcataaggatcctggaagatcatctgcatactcttgcggtaaggaagaagctcatttggtcctaagtggctgatatcttttcctttatagagtacctgtccggaggttggctccagaaggcggataacggttcttgctgtagtagatttaccgcagccgctttctcctaccagactgaaaacttccccttttttgatctcaaagcttacatcatttacagcatggactactttatcttcttttacaagctttcccttttcaaaacgaagggactgcaggaggccttttgtaaggtggaactcctgacatacatttttcacttcaatgagtgtctcagatgtttccatttatgcttcctcctgttcttttttctttaacagtgggaagtgacatgcagccatatggcccggtcccacttcctgcatctgcggcttttcatggcggcagatctcctggcagtatttgcatcttggtgcaaaataacagccttccggcagctcaaacatatttggaaccataccgggaatatagtccagacggtctctgtcctcatacagctttggaatggaatttaaaagtccctcagtgtatggatgtgcattatgataaataatatcctctgtctttccggtctctaccagttttccgcagtacataacattgatcttgtcaaccatctgggatacaactgccaggtcatgagtgatcagcatcagagatgtattatgctccttcaccagctttttcataagctttaatatctgttcctgaatggtaacatccagggcagtagtaggctcatctgcaatcagcagcttcgggttggtagccagtgcaatggcaatgataacacgctggcgcataccgccggaaaactggtttggatattcttttaagcgttcttccggatttgggatgcctactgcatggagcagctcaatacagcgctctcttctctgtgccttgttcatctgtggctcatgaaggatcagcacctcttccatctgtctctggatggtataaagaggatttaaagatgtcataggatcctggaataccatggaaatgtcttttccacggatctttgacatatctttttcactgatctttgccaggtcttttccatcaaacatgatatggtctgcatcaaccacacctggatcttctaccagctttaagatagagaaactggtaacagactttccgcttccggactcgcctacgatacctaagatctcaccttcttttaagctgaagcttacattatctactgcttttaccacgcccttgaaggtgtggaaatatgtttttaatccctgtacgtctaataatactttatcttccataccgcacctcctatttcagattcgggttcagctcatctcttaagaagtcacctaaaagattaataccgaatacgatcagcatgatatacagacctgggaacacagatgcccaccacaggcctgagaacaatacatcaaaaccagtttttacaagcagtcccaaagaaggctgtgtgatcggcacaccaacacctaaaaagcttaaggttgcttctgtcaggataaagcttccgatctggatggttgccagaacgataatggaattgataacgtttggaagtacatgttttataatgataatgcggtttggaaggccgatggtacgtgctgcttccacatattccatttttttaacggaaagtgtttcgccgcggactgttcttgcataagttacccagcctaccatagtcagggcgatgagcagttttccaacgccgcgtccaaatacggacatgatgaataatgcgatcagcatagatgggaaagacagctgtacatctgcaatacgcatgataacagcatctacttttccgccaaaatatcctgctaacagtcccagtgtggtgccaatggcacaggagcagatcatgcctaccagaccgatcataatggaacttgcactaccatagataatggcacttaaaatatcacggccctgttcatcacttcccagaaggaatccggcttttccgccgtctaaccatacaggtggaagataagaatctgccagactgatggcagtcaggtcgtatgggttctgtggagctatgaaacgtccaaatactgcaaccaggattgcaactaccaccaggatacttccgatgatggctggaatattgtgtttatagtgatagaaaaactcagactttaaaaagcttttccaccatcctgttttttcaatggttactttctcttccatgttcatcacctcaattcaattctaggatcaatgagtgtatacaagatatcaacgataaagttcagcaccacaaacatgcaggctgctgccatcagataagccacgataataggtctgtctgatttattaatagcatcaataagcagcttgcccatgccaggccatgcaaaaatggtctctgtgatggtggtgaacgcgatcatatttcccagatccataccaaaaatagtaacgaccgggatcagcgcattctttaaagcatgtccaaaaagaatggacttggcaggaacaccttttgctcttgcaaatttaatataatcctgacgcatattttccaggataccggaacgggtcagtcgaagcatggtagccacattggtcagagccagtgttattgccggaagaatgacataacggataccaccgggagcaaaaatacttaaagctacatttcccaccattaccgtatttccacggccggaagccggaagcagccttaaaacaactgcaaaaatgtagatcatcatcatgccgacccagaaggaaggaagagaaatacctaaaatagaaccggacataataagcttgctgctggctctcttaggataagcacctgcatatacacctaaaggaatggcaatacacagtacaagacaggctgcaacagcaactaattcaagagtcgctggcatacgttcaaaaatcagatccatggcaggttttccatatatataagatttaccaaaattgccgtgaagcacatctctgataaaaataccatactgaactggaaggggcttatcaagtcccaatctggctcttgcagattcgatctgttcaagggttgcattttccggtaccagcatatcaactgggtcaccgataaagttggtcagcagaaatacgagaagagatactataaaaagtaccacgatcatctgcgcaaaccgttttacaacatactttatcataaaatcttacctcctgttatcatcagagtatctaatattccttttatcctcatcttcacctgcctttgcggctggtttggatcatcaccgtcagctgcacacgcaggtacagagaggatgtttgggctccggcggattccggaagcatattttaatgaaaaggagccgttcaattttacacggcccctttactttgttacctaacttttatttgtaagagaactcccatgcatatacatacttgttcattcttggggtgtaatttaaagtatccttgatcgcatatgtatcctgctcaaagtgaagcggaatgtatgcataatcttctcttgcgatcttgtcagcctctgctaccagttcacctctcttggtatcatccatctcagtgaatgcctgatcgatcagggcatctacctgtgcgttggagtaatgtcctctgttgacaccgccattacctgcctcacggtcataggtgtaaagcatatcgtgcataagagaaagtccatcaccagaagcatcagaccatccggtcattaagaacatggatttattctcaagtggtttaatgtagctgaagaagttagcctttggcatcaggtttaaattaaccttgatacctactttttcaagataacctgctactgcctgggcgatctgctcatcgttcatgtaacggtcatttggagcatcaaaggttacttcaaaaccatctggatatccagcttctgctaacagctcttttgccttttcaggatcatatgcttcacgggtaacttcggtgtagcctacataatcttctggaacaacagagttcatttcatatgcgcatccattcatgatgttcttgataatggttccttcatcaattgccagatacatagcctgtcttactttgacatcagacatcggatttttctgtccagggaacagaggagaatcctcacggctgtccaggttcaggtagatctcacggagacccttctgcttgatcacgctgataccctcagttgcgtccagacggtcaatatctcttgcagatacgtcaatagtaaaatcaacatcgccagtcagcatggtagcggttctggttgcttcatttgtaataggacggaaacgtacattcttaatagccggaacttcgccccagtaatcttcgtttgctgccaggtcgatatggtcttccttaacctgctctacgaatttgtaacggccggtaccgattacattgtcagcaacctgctcttctgtgccaacttctgcaatttcctgttttaatacatacagctgggcaacgtcaaacagcattaaagggtttggtctttcagtcttaataacaacggtatttgcatcaggcgcttccacagactcaaagctggatgtgtagctgctgtatgcagatggggaatcaggattggaagccagtttgatggatgcaacaacgtcgccggaatccattacatcaccatcatggaacttaacgccttctcttaaatggaaggtccaggttaaaccatcctcagaggtctcccagctttctgccagacaaggaccaaaggacatatctgcattctgggcaaccattgcctcatagatatgaagcatgatctggtttgtaggtccctcatcatatctgtatgggtccatagacagtacatcagatgatgtaacaataaccaggctgtcctttccagaagcgtctgctgcagtctctcctgctgcttcactgccttctgctgcgctgccagcagctgctgtagtgctggatgcagaagatccgccgcagcctgcaaggcttgctgccattgctgctgcaagtgctactaataaagctcttttcttcatttttcatatcctcctctatcttacttactttttccgccagccttcctcactgaaagactatatagaaaaagcagggcacacttctcgcatgcacagttccctgactgttttcaaagcgcccttgctttagtgaccattttatacgattctttatatcgctgtcaaatgtccgtacagaaaatacaacactttttttactaaaattaattttttattgcctttaggttgttttatttattttattgatatataatcagcctaataaggaggattacttacatgaagcacaaactattgatccttacccggaatccggtggcaaaagtagggatcgcctcttacctttcttccctttttggacaatacctcaccattgtgtctaccagaattgctgacctgacgccagaggatatggaagatgcaggctgtatcctgtatacagcaggtgaattaaaagagcagatgcctttttccattccggattctgtaaaacagctggtatgtatgcgcacatttaatcacacttatctccagcgcatccttcagattccgccgggatcttttgtataccttgtcaatgatacagtggacaccacctatgagatcatggaccagttaaaagaatatggcttttcccagtatcattttcttccctatcttccggggatcgaagaggtgcgggaagatatccagtattgcgtaactcccggagaggtacacttagtcccttcttttatccgccaggtagtagatatcggcaaccgtattgtagacatttccaccatcaatgaactgatcgccgtatttaaacttcccgccagtctggctgatgaggttacaaaaaattacttaaaccatattatccagatacagaaactttccaaccagcagttaagccaggctctggatatgaaagagatcacccggggaattttggagaatgcctcagaaggcctgtgcctgctaaaccagtccggcaaaatagagctgtgtaattccctttttctgcaaatgaccgggatcaaagaacgggatattcaggaaaaagatttttcaagattgttaaaagaggctgggattatttacgattatcccagccagaatgacggaattgcagtacacaatggagaggaagctttccgcatgtggtttcaggacttcagcattgcagacagccgtcaggtgcgcctgatccatacaaacccgctccaggatgatcagtttcctacccgtattacgaaattatgcgatttcagttacttttctactgtaaacccgctgcagctgcatatgttagacacagcacgaagagtatctgtcaatgattttcctattattatagaaggggaaagcggcacagaaaaggaacttttggcccaggccatccatttaaattcccgccgtcacgacggaccatttatttccttaaatatttcttccctgaagtcagagtccgctgaagcagccctcattggcagctgtgaacagcaggaaaatggtgtccgtaaaaaaatcggtgtactggaagctgcaaaaggcggtacactgctgatcaataatcttcagtatgcagattcagaactgcagcgcctgcttttaagtatcttaaaaaatggcttttttatccctttgggaaatggttcctctccccagccactggatctgcgcctgatcgtcacatctgtcagtgacctgtattcccgtgtactggaagggaaattcctggatgaactgtttttccttttaagtaccgtatctttatataccattcctttaaggcagaggcgaaatgatatccccctgctgttggaaaccttcctgaaacgctctttccatgaaccggggctttcttcccgtgaactgctgacagaaccggtattaaccttcttaaaccagtatgactggccgggaaatgtgctggaacttaaaaatgtttgtacctacttttcctgtatctatcacagagaacctttgtcattaagcgacctgccgggatacattttaaaccagatccgaaagcatgaacagcagttagatataacggaacaccggatcctgtcccttattgctgccaatccccgcagcggacgttctttcctgtgcagcaggctgaaagaagaagggatccagctttctgaagccaatatccgcaccagcctgcagcgactggccagtgccggatatatcaaagttcacaggacccgtggcggctgtgagatcacagaactagggggtctggtgaacacgcagtagatcaaacttatatttcggagccgtccgttttggacgactctgtatcttgcggaacagatccatctgtgtctgatgttccaggatccatgactggttccggatgagcctcacaccagatgtcataccagaaaagacaggcatcggtccaggcagactgggcattttcgtattgctctgtgaaagcagaaagttcctcttctgcctgtttttcctgcttttcaccacaagccgcatcctcgttcttatcagcaatttcatttaccggatggtcccagtgttccagctcccgttcttctcttttcccatttttttccaaaatttgctgccagagtccctccacctgctctgccgcattttctattgcctctgctgccaaccgcaatctccactggtcataagcttcttcctccgggatctcccgcagcctgtgacgttctgcccttggcacagcttttaagccttcgatcagcgcctgctcttctgcctttatcctggctgccaatggctctccggaagcctctttttctttccgttccagataatgctcatatccaaaaggataataaaaagcagcgttattttcaaaaatgagcacggactttgccacctgacggataaaataccggtcatgggatacaaaaaggatggtgccttcataggcctgaaaggcggactctaaggtctctttcgcctggatatccatatggttggtaggctcatctaagatcaggaagtttggccggctttgcagcagttctgccagcaccagccttgctttttcacctccggacagatcatccacccgttttgccccgtcctttcctttaaaaagataggcccctaaaatcgtccgcacttccttgtccgtcagggacggaaacaaatccgaaaaatgttctactactgttttttctgactggatcgcagcggaatactggtcaaaatagccgatagtaatattatttcccaatgcacattccccggctacagcaggtaaaaatccggctactgtctttaaaaaagtagtcttgccggaaccatttacacctaaaataccaatcttctgtcctttccggatacgcaggctcagttccagtaatgaatgtttgtcatagccgatctttaaatgttctgcctcaaagacccatttgcttcctgggatcagcggggtaatagtccctgtaaaaatatgggccatatcctcccttggcttttccaccggaagcatccgttctaatattttctttctggaacgggcaaatgcagccttggaaggcttatttttaaaccgtttgatcagttcttcctgacgctcgatctcctcctgctggcgcagataggatttcatctggatctcatagttttttcgcttctgttcccggtaattcgtataatttcccggataacgggtcaattttccctgttccagttcatatacgatatctgcagtccggtccataaagaaacggtcgtggctgaccatgaccacagcccccggatactgccttaaataaccttccagccagctggctgtttccatatccagatgattagtgggctcatcaagaagcagcagatccggctttttaagaagaagctggatcagggcgatcttggtcttctgacctccggaaaaagctgctacagaacgttttttatcttctttctgaaatcccagacctgtaaaaagggtgtcatattcccgctcatattcaaaacgttccctgtcaaaaggtccctttgcagggcagtttaacatcaccagctcttctacggtcctttcttcccctgccagtgcctgctgtcctaacatttccactgtcagctgcctggaagctgtgatccccggtccctggcgcctgtcatcccggtccagactcagctcccctgcgatcagacgcagtaatgtagtctttcccgcgccatttcttcccactactgcaattttctggtttccctgtatctcaaaatcgatatgggataatatggtttcaccgcctaaggtaacggtgccgtcctttatctgatatttcatggtagtaacctcatacgtttgtaaataatcacataatttgataccagggtcaaaaggtctgaaatccgacgcaagcttgcttgcaggaggatttttgaacttgggacccgcaacaaacatgagtaagtagccattttttgaagaaaaatgagcgaattacgaatgtttttagaattgcgagagtgcaaagcacgtagcaattcggtatcagagggggcaaaataccttttgaccccaacatcataatttacagctagtatagccgaacaaccgccctgatgcaagtgtgacaccggtatcacaaatgtactgcaaagtttcctgcaacgcaaaaaatcccctctctgtaacagaaccgccacagaaaggggataaatttttatgtgaaattatgcaaatggattttctgtcttgtacagcattccagccggctggttaaagccgatctcctctacatctacaccgatgtacttaaatacctcatacaggctctttccaaagtgaccgaaagcaacagctccgtgatgtgggaagcccttttcgatcagcacatgacggtagaaacgtcccatctgtggaattgcaaagatgccgatggaaccaaatgaccgggttgccactggcagtacctcgccctgtgctacataagcgcgcagaatgttgtcagctgtactctgtaaacgataaaacgtaatatcaccaggcatgatatcgccttccagagttccctgtgtaacttcttccggcagagaacgtgccatgatgaactgatacttcatttcacagaatgccagcttcttggaattggtatttccgcagtggaagcccatgaaggtttcctttaagtcatagttaaacttgcccttaatgtcctcattgtacagatcttccggtacagagttgttgatatccagaagggttactgcatcctggctgatgcaggttccgataaattcacttaatgcaccgtaaatatctacttcacaggataccgggatgccacggccagtcagacggctgtttacatagcatggaacaaagccaaactgggtctggaatgcaggccagcattttcctgcgatcgcaacatacttgcggtagcctctgtggtcacggatccagtctaacagagtaatctcatactgagccagctttgcaaggatctccggcttcttattgcctgctcctaactctgcttccatgtctgctgctacttctgcaattcttggatcacctgcatgcttattaaatgcctcaaacaggtccaactcagagttttcttcaatctctacacccaggttgtacagctgcttgataggagcgttgcatgctaagaagtttaatggtcttgggccaaagctgatgatcttcagatcagacaaaccgatcacagttcttgcgattggcaggaaatcatggatcatatctgcacactctgcagcggttcctaccggatattccgggatataagccttgatatttctcagctgtaagttatagcttgcatttaacataccgcagtatgcatcgcctctgccggataccaggttgtttccggtctcttcagctgctgcaacaaacattttcggtccgtcaaagtgctttgcaagaagggtctcagaaatttcaggtccgaagtttccaaggtaaacaactaaagcgttgcatccctctttcttaatatcttctaaggcctgtaccatgtggatctcgctctctacgatacagactgggcactcataaatatcctctggatcatattttgccttgtaagcgtctaccagggcttttctgcggtttacagataaagactccgggaaacagtcacggctgactgcaacgataccaacttttactttcgggatattctcaaacatgtttttttcctccatatttacagggctgttccaccacagcccttatttatacttttttatgctctaaacttctgtattttcacctttcagtccgataaagctgccttccggaagtccgccttctgcatgaccgatgagccacttattgacagctgccaaaagtttctcttcgccgctcttattttccggcttgtggcttaactccccgttagttccctctggaaggacaactacacagcggaaacctttatcagaggtctggcatggcgcatagtgaagagtcgttgcatacacttcgatcatggtgcctgcaggaacgaaaaatgcctttaccttggaagtatctaatgtatagtcatcttctacttcctcttcttttgccagaagcagtaccatatcgctgactgcaatattgatctcagagtctctgtgatactctaacgcatttaatttacggttgtgtccgttgcagtaaccgatctggatcggcatctgtccgtaaacaccgtctgccagttcttctgctatctttaaatcttccagttcctttacagaagccacatatactacatcatccgggcatggagtttcttccattttctgtaaaatttctttcaggtcataacctccgatgaccttgccgtactttttaaattccggctccattacacttatctgtttgatcatgataattctgccagctccttataatcatttttcaggcttgtatacaatttctgatacagtctgtgatatttttcataaacagccacatcttctgcctttggctctgtgctgtccctgcgtgtgatcagctggtcacatgctttttccacactttcataaagaccgcaggcaactcctgctaaaatggcaacgccaagtgccggaccttcatcctgtaccacacgctctacggagcagttgtacagatccgctaacatctgacgccatacagggctctttccgccgcctccgcaggctttcatacagtcaaccttaacgcccatttcctgaaggatctcattgcagtcgcagagagaataagcaacgccttccattacagcccgcagcagatgctttcttgtgtggatcgcagacagaccgaaaaatacgcctctgcagtccggatccagatgcggggtcctttctcccattaaataaggaagatacagcagacggtcacttccaggtgccacagacgcaacatcctgattgatctggtcgtatacatctactcccttggcctctgcctcttttacataatcctggcagaactggtctttaaaccattttaaggaaagtcctgcagcctgggtcacacccatcatatgccatgcacccggtactgcgcagcagcaggtatggatccttcccttcggatcaatggcaggcttgctggtatgtgcaaatacaacaccggaagtaccaatggtagtaaaggcagttccgtcttttacaacaccggttcccactgcagctgcagcattatcaccggcaccgccggctacgatacatttttcagaaaggcctaattcctttgctacatccggaagcagtgttcctgttgcttcgcaggactcatgtacctttcctaaaaggttcttgtcaatatttaatgctttcagcacttcatcagaccagcagcggcccggaacgtctaaaagctgcataccgcttgcatcagaaacttcagttgcaaatacaccggtaagtatgtagcggatgtaatccttaggcagtaagatatgacggcagcggttataattttccggctcatttttccgtacccagaggatctttgctgcagtccagcctgtcagtggcgggttagctgtgatacggatccattcttcccttggcatgatctttaacatgtcctctacttctgcgcctgttctctggtcgcaccagataatagaaggacggatcacctctccggcctcatctaacatgaccaggccatgcatctgtccggaaataccaattccctttactgcgtctttgtctacacctgactgtgaaacaacttcctttatggtcttaagaactgcatctctccagtcctcgggcttctgctctgcccagccattttccggctgatacagtggatattcctgtgaagcggaagcgatcacggttcccttttcatcaaacaggaccgtctttgttgcggaagttcccacatctattcccaagagataattcatgatattctcccttctcctcttatgacagccattcctgccaaacatattctaaaatgattataacttatcctaaaccgtcattccagagcagttcttatctttataatagcactttcttatccttttacatcattcttatcatatggtatactttattgcaggatctgcgtgttctgaccggctttttaagccttatgtacacctggaatttttacggaaaggaagctacaggatggattttaaatatgaaatggtcgttccaaacgaagacctgccctgtaaatttttcatttttgaaggaaaaaacggcaattaccgccgcgccaaccactggcaccagtctgtggagatcttcctggtgctggaaggggaactgaaattttacattaacaaccagtcccagcccttaagtgccggggaactgatcattgtcaattccaatgagatccactccattgaagcgccaaaacccaatctgaccctggtgctccagatcccggtttcttattttaccccttatatgggaaaagaggactatgccatatttgtaagccagtcccaggagaaaaaccgcgcgctggctgttcttattgaaaaaatgtatcatgtatatacaaaaaaagaaaaggcctatcttttaaaaatgcaaagcctcttctatgaacttttataccagatggcaacggaatttatgaaaacagaggcagatgagggaaatctgcggcagaaacggcacttagaccgtctctcccagattacttcttatatgaagaaacactatgatcagccgatcactttggaaagtgtagctgaaacattcggcttctcacccaactatttatcccgcatgttccgcctctatgcagggatcagttacaaaacctatcttttaaacctgcgcaccgaatatgcattccgtgaaatgctacacacagaccgcagtttaaatgacattgccattaataatggttttcccaacagccgtgcctttgcaaaatcctttttaaagcgctacgactgtcttcccggggaatacaggaaaaaaatacagcttactgcttctgagacttaaggatcatcagagacagatagggaaccggctcctcctttaaggtctgatactcccggatcagacgctgctctttggttcccgccttttctaccagtacaaaggaattttcccttccacttgcctgaatagctgaaaccaaggcttcactgtctgtggaaggcttcataagcactacattctcatgttctgtaagaagtttttccagatccgctgcattatttttccggaccggtgcgatcaccagatcttcatcccaggcagtaagagggatttttgaaatagccgctgctgcacagaaggacggaattcccggaactacctctgtctctgtgccaaaagcttctatataaggaagggtatacataaaggtactgtatacagagggatcgcctaaagtaataaaagctcctgttttatctccttttaaatattcagagatcaggcgtccgttttcttcccacatttttttcagctcgtcccctttataatgcataggatactccagatttacgatctgggctttactgtcttttatatgttcctttataatatcaaaggcaaaactacctgctccttttttcttttccggacagaagatcacatctgcctggttaaggatcttatatgcttttaatgtaagcagttccggatctcccggtcctactccaattccgtataattttcccataatttacctttcttctatctatttttctcaacaaatccattttaacagcacttaaccaccacagcaaggaatttttatggtaagataggtctattactatattatttagggaggaataatttattatgaaaaaaacaatgaaactgctggcggctgctcttgcaggcactttagtgttaggcggctgtgcaggaaataaggaaactactgctgcttctgctgaaagcgagactgtaaaagaaacagaagcacagagcacagaggctgaaagctcacaggcagaagctgaaactgaaaaggaagaaactgagacttctgacgcagccggttcaggtactgcgatccgcgttggctctttaaaaggacctacctctatgggactggctgaactgatggatcgcgctgaaaaaggcgagacagaaaatgactatacctttaccatggcaggaaaagcagatgaactggtaggttccattgcaagtggagatctggatattgttttagtccctgccaatgttgcaagtatcctgtatacaaagacccagggtaatgtaaatgtgatcgacatcaataccttgggcgttctctatgtagttgcctctgatgattccatttcttctatggaagacctgaaaggaaagaccgtttacatgaccggaaaaggaactaccccggaatatgtaatgaattatctcctttctgaaaatggccttactgacggggatgttactctggaatttaagtctgaggccacagaggttgcttctgtattaaaagaagattcttctgcagtaggcgttcttcctcagccttttgcaactgctgcctgcatccagaacgaagctttaaagccggttcttgacctgaccgaacagtggaaccttttaaataaggaaaatggaagccagttagttacaggtgttaccattgtgcgcagcgacttcttaaaggaaaatgaagaggcagtgaaactgttcatcgaagatcacaaggcatctgctgcctatacaagcgaacatctggatgaagctgctgaaatggtagctgcactgggcatcgttgaaaaggcacccattgcgaaaaaggctatgcctgcctgcaacattgtatgcatcacaggtgaggaaatgaagtctgctctctcaggctatttatctgttctggaagctgctgatgcaaaatctgtaggcggacagttaccggctgatgacttctactatcttccataaatcacttacaggatccttttcttattgcttcaatgaaaaatctgatgaaaaaatatggaaaaaactgggtctgctggctgatctggatcgggatctggcagctggcggaccttttcatccacaacaatattatttttgccgggccttttgacatggcactgacgctggcaggactgttaaaagacggggatttctggctgagcctgtttcactcttcccttcgcatctgcctgggatttttaagtgctttttgccttgggatccttcttggaagccttggttgggcctttcccctggtgaaagaatttttaaaaccgcctatgctgatgatccgatctgtaccggtggcttcctttgtcattctggcactgatctggatcgggtcagaaaatctgtctgtttttatctcttttctggtggtagttcccatgatctatggcgctacgctggcaggacttgaaaatatggatcaaaagcttttggaaatgtcccaggtcttttccatgccatttctaaaaaaagtacgctacctcttcatcccggctgtccacccttatctggtaagcagctgcaggactgccctgggaatgagctggaaatcaggagttgctgcagaagtgatcggtatcccgaaagcttctattggcgagcaactatattacacaaaactgtatctggatacttccgggctttttgcctggaccttttccattatccttataagcgcagtttttgagtttgtttttcttacattattaaagaaggtacgtcactgatatggaacagatcataattaaaaacctgtcaaaatcttatggtacactgaccgtcttaaaaaatgtggacctgactttagaccggtataagacctactgcctgatgagtccttccggaacaggaaaaaccactttattccgtattcttatgggactggaaaaggcagatgaaggggatattatctggaatgtggggtccggagccgggactgaaactgatacagatgcttcccgttctctgcgcatttccgctgttttccaggaagaccggctctgtccttctttttcccctttggaaaatgtgatgatggtgcagaaaaaacatgcttctgaaatttccgggatttccagggatgagatcctcacagctatgtgccgtcttctgccggaagaatgtttaaaccggccggtatctaccttaagcggcggtatgaaacggcggactgccatcctgcgggctcttcttaccaggtcggatctgcttttaatggatgaaccctttacaggtctggatgagggaacaaaagatgaggtcataaaatttttaaaggaatacagacaggatcgtttccttctgatctccacccatcagaaggaagatgtggagaaacttggtggaatattgcttactctgtaatattttactgtttaaaagcccggttttgccgggctttttatataccgctggattttactgcgggatttttgtgatccccttaatttctcggctggatcacactttttccattgtcaaaagacggattaaacgcatagaaattcttgctgtctaacttctcctgggtgatgcgcagggcttcaccgaatctctgataatgaacgatctcccgctctcttaaatatttgataggctcacatacgtcataatctgtgactacacggagtatattgtcgtatgtggagcgggctttctgttccgcagccatatcttcatgaagatcggtgataatatctcccttgctctggaattcacaggcattaaacggtacaccgcctgcagcctgaggccagatcccggtagtatggtcaatataataaggaccaaagccctgttctaccagctgttcggctgttaaattccgggtaagctggtggacgatggccgccacgatctccaagtgggccaactcttccgtgccaatgtctgtaaggactgccttgcactccttgtatggcatggaatagcgctgggaaagataacgcatggaagcacccatttccccgtcgggacctccatactgactcatgataaacatggccatcttcgcatttggttctttaatatttacaggaaattccagtctcttttcatagatccacattaataaccgcctccttcccatggccacgggtcgtctgtccaggaccagtagactgtatctctggcattttcagcacgaaggggaccatactgggcttcgtaagcatttcttgcatctgcatatgcctgggacatctgtttcagataagcaatcgcctgagagtcgcagggatgtgtatccagataaagatttgcctctgttaccgcaaaacctgcctgattgacagccatgagcagggcatcttttgaagtaccacccattctgttcatgctgccgttcatactgttattcatgtttcccatcatctagctgcacctccctttatcaaaggccaggtccagctctgaaaagatggttccttgggctaagccacgctctggtccataaggcgtctgccactgctgccatggtacataggccattgccaaaggataatctttttctaacatccccggcatacttcccggacagaaggcattgccctccagccccggcatgcggttccagccgaaatttccgttattttcccaattatttccagtttccggtatcatctggggcatcccgtcattcatctggttccccatctgtggatacctgactccgcttcctgcctgcatcgccggatccagacagcttcgtacagactggttccggttaccggataccttgcggcaccggccactgcagccgcagtcactatatttcatatctgtatatgactccatataaatcaatagctccttttcttttccctattaatttatgtagcccggttaatagctgttacaacggctgctgtcctttcttacgttcccttattctttcccgcactccattttcccttcccgtatctgcacacattgtccctctgtcccatatcttatagtacaaacgtatcaaagacagcacttaccggtgcttctttccttcgtttagcaaatggtcaacaactcaacaacgaaaaggagcgtagatctatgtgttggtttggatgtaataatcgttggaataatggatgcaatggctggaacaacggctgtggcggtggatgcggacgttgtaataacaacggatgcggtggaagaaattccttccgtgaaggcttccgccagggatactggcagggctacaatgatgcactgtggaaccgcggcggctgcggcggtggatgcggtggtagtcgtgatggcggcggttgcggcggtcctggcggcggttgcggcggcagtggttgtggcggtggtcgcgatggtggctgtggcggtcctgatggcggatgcggtggatgcaattagcccatatactctcatgcctctcccggtatgaccgagcactttccagtacagatctgcatagacaggtataaataagaatgtgcctttttgtgtactagggagttccaacggaatttcctagtacatgaaaaatggcggctgagaagagaccgtttcaagttttgtgtaaacgttaaaaactgatataagatttgtgaatagttacaatgggcagagccgattttccggattctgcccatatct

SEQ ID NO: 3569 - DNA, 5739 bp, Unknown
  gut microbiota DNA sequence
gggacagaccagttgcagccaatggcagatatagtgaaagaaactgctcccgataacagtaatgtgtattccgtgacagcactatataagcgctatgtcacaagcaaagaacctctgctgttatcggaagatataagaaagctgtaccgacattatgtaaatgtagaatatgcttttggcacatcacgcgaatgtcagaatggagattttttgtgccgaaagaccttcctgtcatgcgagttttcgccatttgatttggaagaaaagaagaaggatcagacctttatgtgttacgaaatttctccagatttgatcccacaaaatgcactgtcagatctatttctggcaacgagatataccattgtgcaggcattaacagaaccgatttttatacgttctaatgcaaagttggtggcgctggaggcaagcagtttttcgttgatagtcgataccagaaaccgtcatatcattgatgaaatggatcagatattaatgagccggtatgcgcatttgctgtctgaaagcggatgcaggatgccagtgataaaacgatactggatttgaaagatatggggcggattttgtgccatgtgcgtggcgtaatccaggtggaaaacgctgcggcctgtgcatggcataattatgttgtgccatgtacaacagaagaaactgcgccatgcacatggagcttatacagtaagaaaaacctatagaatgcctgaaataatgtttttaaacccataaaaaggaatacatataaaggatatttttagagctgaaaaatccagaagccaggccccatgaaatatgtatgagaaaaaattagaaataaatgagagtagatgaggtggtacatgttacatcttcgaatgatttacgatgagattttaaaaaatagtgtatttgcaagttccaggcccggccgaacagatgcaagggtgattttaattctggccctgctcttaaaatataagcgccttaggcggaagatgatcctattcttgattcagcatattgatccgtgtatccaggaaactggaagcatggggcagcggacggtcaaaacgtgcattgaacggggctggataaaaatgcaggaacaaaggggagcgcgggagaaagggctgtattccattactcaggctggaaagaagcatctttacgaattgataaacgaatatttccaaggagaaaccgttcaaaacatggtttcggttctggatacgtatgctgcaggcaggacaaatatggaattatccccgcataaggaagcagagatcgcagcggcgctgaaaatggtactctctgattatagagagaaatggacgcagctggagtttgaagttccgtattcagttgaaatgatgcgggagtatagcggccaggcgaagaagcgtggagatatctttgcagatctaaaattgtcataccgatgcacggatcacttagaagaacgtccactttgtatagagattgatatgggaacagagcgggtaagtacgcatggtggattactttttaaatgcaatgcgtatgcacaggtaaaccgccggatgcggcaaatctccctgcatcaggcaatcaatgtggtgtttgttttcagcaatgatcctgcggatgatcttcagcagacagatcttttaaaatttgaatccataaaacgttatcaacagccgctgctgccatttctgtcctttatctgcaggcaacaggatccagatgcttctgtaactttgaaaaaaatggaacaggccctgggaaaggtaaaagaatgtgatgcgtttggctatgaaaagaaacagttttatcgagatgcagaattctttttgcatgttttaaaggagcagtgcagtaatcaggagcaggccgaagagaaagaaatcctagcttgtatgacagaaatatcggatttctgcagaaatcatttggaaacatccagaacagaatacagcaggcagtatgctctgaaaaagagaatggatctgtttgaacagatcagaaagaataattcgtatgcgttggaggggttgaggaatggaatgagcctctcctgcaattcccatcaggattttgaacaggaaattccatttttattcccggagctatacttccgggatcagtttggagtctttctttatcatttgggtattaccagggaaaatgtaaaggtttcatccgtgtatgccattccgctgtttgaagaacaggacgttgcagaaattggtacagtttaccgatgcgtatttatggttggtgagcttacggtcctgattgaaaatttgagttccgatatgggcggccttatccgggcaagggattatgtacggctcccgccggccgccagagagaataccattatgatcatgctgatgaatgacagggaggaactggctgacgggagctatctgaaagaagggactttatataaccagtggggcagtgaggagcacatcacggatcaggcagccatgggaatggccttacttgcaaaaaaggtggcaccggcaatgacagcactcggtaccgggtatgcttttgagtcggttccctttctgatgaactctacacaggattatatcatgcttcactattcagaattccttcaggcacttcagagaccggtacggccctggatacgaatggacctgtatgtgaaggaacaaagcaaggtgcagtatatcccattccttatataccgtacaggagaacatcaggaaggggaaacatataaagttccattccatacagaaaagcggtgcacgccgattgactggagaggattatgcaatgattagaaagaccgttgtcctattgctgatcctggcagcaggtatctgtgtttatcagggatcgtctccttatatagaggcgcgcatggaacaggagcatttgaaacaggcagcatttcccggaaatgaaggaaacctatcagaagaggaggggcgtaaggggaatggaccaaccagggaagaaacggtgctttatacttcaccgatagattttgaagtcttaaagagtatcaacccggatattgttggctggatacagattcctggaacagcgatcgattatcccatttgctggcgggccggtgataacgaatactatatgaaacattcggcagaaggtgagaagcgggcatttggtgccattatgctggatggtgccaattcctctgctgcagaggagcatctggtcgttctctatggccatcatatgcgcaatgggacgatgtttaaagatatcgtcaggtatacggatgccgattttctgaatgcccataaatcaatctctttatttttcccagacaggcaagagcgatacagcgtgatcggaaccatcgtttgttcagcaaaaaattttgaaccatcgcaaatggtggaaaagaaactgctttttaaagaatggtgccgtaattcatggaaaggattgccggaagaagaaattcaaaagaaaatgcttgcactggtgacttgcagttatggaagcagggatgaaaagacaatctgctttgcgatgatcgaaaaatgaaggacaggaggtgatgttcctgcgcgttagaggtaggaaacggttatgaaaaaacggatattcggacgaatgataaaaaaattaaagtggcttgtgataattagtgtggtgcttgttgcattaggaacggttggaattggtattgcatcggtataccacatgaaatatgcactgaagagtctgttcaatatggagttcaacacgggaaatgattcgtgggcctttggagacatctcattctataataaaatcggggaacgggcggttgcgatagcgaggtcacgtttgaactggtcttacagccaggcaaagagaaccttggaaggatcctgggactgttcatccatggttgcgcgctgttatcaggaggctggctttgacttaaaagctatcatgggagcgcagtggtgcatgacaacggttgggtggaaggattttgcgactagaaacaaacagtttatagaggaagcggatcttcagcctggagatgtaatctggtatgggagaccatctggtaatcacatgatgatgtatgcgggaaatgggcaggtaatccatgcaaaaggggaaaaatacggcaccgtatatgaaccattggcaaataccggctaccggtcggcgagacaggtttactttttccggccatatttgaatttgcttgatgaaagtaccgatgattcctcagatgatgcttattttgcagattcgtccgggtatggacctgataatgggatcgtcatgcaggtgccgggaggaacggtttggaccggctggacggtatttgagtctggaagggaacggtttaaccttgccggaagcgatggcggatatgcatatggctgctaccagttcgatatcgggtattccctggtggattttttgaaattttgcgtatcctataatcaggcacactatggagcgttccagcacttcatagaaatgtcttccatcgaaagtggttaccggaaggaaacggatacaaagccgagcatgataaacccgccgttatattcaaaccgtgcatccctgatcaatgcatggcatgccgcttacatgaattacccagatgaatttgccggactgcagagccggaccgcctacgaagcttactacctgccggcgcagcgtggcatgctatccaattatggcatcaatataaaagagtacagcccggcccttcggggtaccatttggtccctggcaatccgaaacggaggaaccgtcagtacggataatacaaggaatggtttaagatctgctacgagtacatattctcccgggattgatgaacgggaatggcttaccaaaatatatgaggcagaggcaaagcggcatccgtcccagagaaaacgctggggaacggagcagctggcggcctgctttgcatttatgaatggggccacacatctgggcggcttggatggaaattatgacggggcatttattggatcacttaatacgagcgcagcagcaggtggtgtttccaatgccatgatgttaaatgccatcaaaaatgatgtggttttgacggagagcgattatcggatcctgaagataaaccgggatacgcttctgtacctgctgcagaaagcgtatgactatgagacccagtacatgctgcagcgttccattactgtatacgggttacgggagtaccagattgaacatgaagatgaagagggaagctggtatgaagatgctgaggaatatgtgagcaaacaaatcctagtcagcaatgaagatacggagtgtatgctccggctggactggcagatgctctatatgtattccattctggcatccatgggaagagaagaccgcggggaaaccgaggggatatgggactgggaaatcacgataaaagatgtggatgtggcatttgatcagatcgcgatgaaatatgattatgcttttaatgtgatgacagacgaaaaatccgaatatgattttgcgacctgccagagcctgccgcataagaccgaaatttacggagacccagacacaaccagtggaagatatacctggtattatccaaacagcctgcttcgcagcgcttcttccggctattctgacctggcatatacctattctggaggtgagataaacgggattgttgaaacataccagaacgaacgctataaggggataccggctgcactcacgcggtattataattttgaccggtttcatacactggcaaagtatatg

SEQ ID NO: 3570 - DNA, 6613 bp, Unknown
  gut microbiota DNA sequence
ggtttaaatagatcccatgatacaccgccttatggcagttccggctgactaatatctttcccctgtggggaacggctgcgctgatggccgacagcaacccgcaggtgcttccatttacaagataccatgtgtggtccgaaccgtaaaggctggatgcccatttcatggactcttttaaaattccttctggatgatggagattgtcaaaaccatcaatttctgttatatccacagaaaatggatctggaaaggacagttttataccttctgcccgcttatgtcccggcatatgaaagggatacatatccgatctccggtacttttttaaacgttcaatgagaagttcctcttttttcacctttttctgctcccggttcccgcgtaaagccctttttcattttgcagctgcaaaaggcggatcactgtagcacgcagctgacggcggtttctcacctggatgaatttatccggatactgtgctcccacccgtttataatcttccttcttttcccggctgcgtccatttttcaggatccataagataaattctttatccatcttttctatacagccatctgccatgctttttctggtatggcctttgtatctgtaataacggcgcagcgcctgccacagacagatccatcttggataatccataaaaatgatcaggtctgcttctttcatccgccttttctgacagaatttttcgtaatttccgtcaatgacccagccacgctctttattttcctctaaaaactgctcacaaagccggttcccttctgcttcctttcgctccttccagcctgcttcaaactgaagtttgtccaaatggagcaccggacagccaaggatcttgcccagttttgctgccagcaccgatttaccggagccggtatatccgatcactgcaattttcattttttccttccccgaatgttaaagcactattgaaaaaatcccctgcaagggccttatacctgttataaagtctctgcaggggattggctgcctaaaacagcttatttattattttgttgcagttcttgttttcatgaatatggaaacaagaagatgtcatggctgaactgtaacattatttttctcttgtttcagtcattttcttaacatctgcgataaatgtgctaagatcagcaacaccaaggtcgcccttgtcacggcttcttacagtgatcttgccttctgctgcttccttctcacctaataccagcatgaacggaactttctctaactgagcctgacggatcttgtatccaaccttctcatccttacggtctaactctgtacggataccggctgcttttaactgatcatacacaccctgggcatattccatggacttttctgatacaggaataaccttaacctgaacaggagccagccatactgggaacttgccagcgaaatgctcgatcaggataccgatgaaacgctcaatagaaccgaagcatacacggtggatcataataggacgcttcttagtaccatcttctgctacatactcagcctcaaaacgctgtggaagctggaagtcaagctgaatggtaccacactgccaggtacgtccgatagagtctcttaagtggaagtcgatcttaggtccgtagaatgcgccgtcgccttcatttacaatgtactttaagcccatttcatccagtgcatttctcaggccgtttgttgccatctcccaatcttcatcagatcccatggaatcttccggtctggtagaaagctctacgaaataatcaaatccaaactgagagtaaacttcattgatcagtcttgtaacgcccttgatctcgtcagtgatctgatcctgggtcatgaagatatgtgcatcatcctgggtgaagcagcgtacacgcatcagaccgtgaagctgtccgctcttctcatgacgatgtaccagacctaactcaccaactcttaatggcagatcgcggtaggaacgaggctgggacttgtataccagcataccgcctggacagttcattggcttaatagcatagtcttcgtcatcaataacggttgtatacatgttctctttgtaatgatcccagtgaccggaggtctcccacagcttacggcttaagataacaggagtagaaacttcctgatagccttctcttaagtggatctcacgccagtagtcgatcagggtattctttaaggtcatgccctttggaaggaagaatgggaaaccaggtccttcttctgcaaacatgaacagtcctaattccttgcctaattttctgtggtcacgcttcttagcctcttccatcatggttaagtaagcttccaggtcttctttctttgcaaatgcagtaccataaattctggtcagcatcttgttcttctcgctgcctctccagtaagcacctgcaatgctggtcagcttaaatgccttgatgccctttgtatacaggatatgtggtcctgcgcacaggtctacgaaatcaccctgctgatagaagctgattgtctcgccttctggaaggtcttcgatcagctctaccttgtaaggctcgcccttttcctgcataaatttaattgcttcgtctctaggcagaacgaatggctttaatgccaggttctccttaacgatcttcttcatctcagcctctaacttttccagatcatccggggtaaatccgccttctctgtcaaagtcatagtaaaatccgtcatcaatagccggtccgattgccagcttagtctctggatacagtctctttactgcctgtgccagtacatgggaagcagtgtggcggatggctcttaattcgtcttttgcttcttcaacacttccgtctggtaaaataatcttcatggtaaactcctttcgctttaaaacgcgtttttagatcttttggatatgtcctataagattttcaggtattaaaaaacccctggacacatctctatgtccaagggtgcatatacacggttccaccttgattttcactcattcatcccttaacgcggggtacggtatcatttcccttgttcaagttccctgatacggctcaggactggtcttcatctgtctcccacatgcgcctttccaccaaccggctgctctctgtctgctttcatcagattactggttccttcaatgccttttgcatttctgctaaccttgattataacatttaagccatttttgtcaagatacaatcaatcctcttattccctttccgctgtatttctgataagatatactctgatttatcatttctccactttccgagaacaacaaccgtaatccataaaagagattataaaggaggaagacaacctatgaagatcgttatcatagatggccagggcggccgaatgggaaaagctgtgatcgaacagttaaaaagcagctatcccgaacttgaactttacgccattggcaccaacagcattgcaacctctgccatgttaaaagccggtgcctcttatggagccaccggcgaaaatcctgtgatcgtcaatgccagaaacgcggacctgatcatcgggcctattggtattgttatggcagactccctgatgggggagatcactgctgccatggcgaccgctgtaagttccagcagtgcctataaaatacttatccccgtaaatcgctgcaaccactttattgcaggctgtcagggtggcagtttaagtgactatatccgccaggtctgtgaagaagtgggcagacatttatccatttaaacatctaaaagaaagaaggcttgaccttatcatgagaaccgttgaatttaaaatggaacgtcccggtcttgtaagcgccggtgacaaagtaaagatcatcgaacgggaaggaaccagcagctacagctatatcattgacccggctgtagccatgtccggctgcttcgccgccagagaccgcattaaatccgaatatggcattgtaaaagatgtccgtgaaaattcacggggattttacgttgtagttgattttgatgaggaagatgttcattaaattttccccaaacttgcttccggtgctttttatgataacggcacgatcttaatttcttctgctgttgtttcagcagccgttgttgccggtgcaataggcgcggtcgctaccgtagtctcttctactcgttttccaggtgcatctgttccgatcacaacttctgttggatttacggacggatgcacctttcctgtctctacaggtgacaccgaactatgtgtcggcgttacaggaacgattttttctgcagttgttgtagtagtttcttctacgctggtccctgtttcctcttctttgatctcttccactgtttcaactctcgtttttgccgaaacatccagggaaaccggtaaactccaaagtacacttgaaataccgccattcctgctccagttgcagtcatgccaataaccgattatcttcccatcctgaagtgccaggatctcgatcatatcatttcctgtaactttctttcccgttctttccgaagtgtcttttactgcataaatagtaccatcctgctttacattgaccactacaccatacgcattttcccagatcttcggatgatactctccatatatttctccctggctttcaaaatagtagagattaaaaacagctcctggaaaaataccgctgactacctttttctctttgccattcagatccgttttataaatacggctgtaccattttccatctgcagtcttttccacataagcgctgaaaaaaatggaattatccacaatgcagtaactttgtacaccataatctgcttttgcaatagttttgcttccagaagaactccgccttacaagctgcatctgtgatcctgttccctgaagttcgtaagaactgtcatctgcagcaatcggatttttctttacataactgatcttaccattttcatcaaccttgtatacacgatcttctacggtaatacctgcgcttccagcagatgttaccggctttccaagtgcatttacaagataacatgcatctccttcgatttttacctgatatccaccttcagaaagttctgtctccgtaccggaagtggttgtatggatcttcccctcctgggcataataaatagtttcatccaatacaagatatccgtctacattttcagcaatgatctcttttgtattctgtcccggtatcatacgaaccagcacatcacaccgttccttctcctcttctgaaagagaagatcgtttgctttctgccaccttcgggagataatacacatagtctccataagctcttaaagagtttttcgtggctttctccgggttcttttcattgccaagtggttttaccttattgtctaccgttttcttatacagaatggtcttaaaaagtcctgtatcctcactgtccagataacaccagaaagcattggtcctgataaaactatccatgtcttcccctgtatcttccggtacatagttgggatccggctcaatatttttcaggtatccttttacatcatggcaggtaaagatctgaccatctcctttccactggccagttgccatgatccccttgtcatcaaaatgatacaaaaatccttttatttccaaccactgatccacggcataggtcttttcatcgatcttatacttccagccgtcctctgtttcctcccagcccagctgatccgtctcttttgtctcagctgccgatatttccagtgtctgtttttcacttgccctggtcatatccaatttttcataatctgaatggatctttccaaaaacgatcactataacactgatggccatgatcataaaaataatggccacgatcagcaacagcgctgtttttaaaccagagtccttctttcttcttctcatctcattccatcctcttattcataataacttcgtgatatgataaaataaataaaacgaaaaaagcggaaaatctcaatttctaagattttccgccacttttcaaagatgagcgtgcggggattcgaaccccggacaacttgattaaaagtcaagtgctctaccgactgagctacacgcccttattaaattacttaaatgcccaaagtcggaatcgaaccaacgacacgaggattttcagtcctctgctctaccaactgagctatctgggctttttccttatgcctaaggcataaaaattgcgggggcaggatttgaacctacgaccttcgggttatgagcccgacgagcttccagactgctccaccccgcgttacctaaattattataaatacttacgtttcatttgtcaataagtatttaactgggcgaaggtggattcgaaccaccgaaggcagtgccagcagatttacagtctgtcccctttggccactcgggaattcgcccatataaccattatactctttttctgataaattatacttagaatggggcctacagggctcgaacctgtgaccctctgcttgtaaggcagatgctctcccagctgagctaagaccccaactgtattctttatcaaattgaaaaagaaacgacccggaacgggatcgaaccgtcgacctccgccgtgacagggcggcgctctaaccagctgagccaccgggccattaaaggcatttacatacct

SEQ ID NO: 3571 - DNA, 1266 bp, Unknown
  gut microbiota DNA sequence
cgcttcccgaagcatcactccacaaagcggaatcaccaacgcagcttccagtagggagataccacgaaaaatggcattctggcaaaacagataataaaagctgacaaaggtaacagcattctgcccactgtggtagcgaagcggaatccgcataagcaaaagttcagataaaaggccgacaagcagtaccgcttccttacatgcaaggatataaattccatacatccatatatggagccaggttccgtaggagccataaagggccagtaaatctccaaccttcgcattttccagaacactattcaggatattttccccgaaaaacaggtgataaccgatgcccaatatcaatatgatccatgcaatataatcaggaatgcaagacagcacccagcgtttgcggctgccgtgctcatgcctcctctgtcgtaagagcccgattccccatagaattggataaagaaatacaataagaagcagcgcaaggttcgtttgtggctgcgttgtcgttatgatcaggctcaggcgtttggcctgtgaagctgtgctctgaagattcggcacatgcgcaaaaattgatagcaccgacacaaagagtactgcaaagactcctggtatcgccatcagactgaatgtttctgcttttgactttcgcttcaccagattatatagatcgttaagatacagacctgcattcagataaagaagtatcattgtgagccaaaagtccggtaaataatcggcatccgccgtatacaatcgaaagaaattccagagtgtctctatcatttttcaattttctccctattgaaagttatcctgtttatttttacagaaatcatatcatattttgtcgtaaaaatcccgatttgtattctttacgcattttgttaaaatgtctttagtcattgtaataattatctggatctccgtatttcagaactgcttcttgctgttcctcatcatctaggtttctcataaacagccagttttcctcgtacatataatgggggtatctaaatcgtgttcttgcaaacgtattatttacatagagagcaatatgttcatcatactgctccaccttttcctcaaattgaaaactataaagcagccagttccatgcgagaaacaggaaaagaaaagctgcggccgcgaacatcggtatcataacaattcttttcctccacccacagaagattttatttacccgcattgataagaaaaatgtccctgttatcaaagcaatctgccagaatatgcagaaaa

SEQ ID NO: 3572 - DNA, 19371 bp, Unknown
  gut microbiota DNA sequence
ccaaaatatatgtatttatgtatctaaaagatattatacgaggaagtaacagctatgaaaaactacaggatcacagttgcaggaacgggatatgtggggctgtcgattgcggtattgctttcacagcatcataaggtgacagcagtggatgttgtgcctgaaaaggttgagatgatcaatcatcgaaaatccccgatccaggacgagtatattgaaaaatatctggcagaaaaggagttagatctgactgccactctggatgccagagaagcctacaaggatgcggattttgtagtgatcgcaacgcctaccaattatgacagccgcacacagcattttgatacatcagcagtggaagctgtcataaaactggttttagagtataatccgaatgcgattatggtgatcaaatctaccattcctgtaggttatacagcttccatcaggaagaagtttggcagcaaaaacatcattttcagtccggaatttttacgtgagtctaaagcactttacgataacctgtatccgtcacgtatcattgtcggtacagatttaaaagatccacatctgacagaagcggcccatatttttgcgggtttgcttcaggaaggagccatcaaagaggacatttccaccttatttatgggctttacggaagcagaggctgttaaactttttgctaatacctacctggcactgcgtgtcagttacttcaatgagttagatacctacgcagaaagcaaggggttaaatacccgccagatcattgatggtgtctgtttagacccccgtattggcagtcactacaacaacccgtcctttggttacggtggctattgtctccctaaggatacaaaacaactgctggctaactatgcagacataccggaaaatctgatcgaagcaatagtggagagcaaccggacccgcaaggattttattgcggaccgtgttctgaaactggcaggctattatgattatgatgaaaaatttgagttttcagcggataaagaaaaagaggtaacaataggtgtttatcgtctgaccatgaagagcaacagcgataacttccgccagagttcgatccagggagttatgaaacggattaaagcaaaaggtgcgaaagtagtgatctatgagcccgcattaaaggatggggaaacattttttggaagccgggtcgtcaatgatcttcagaaattcaaggatatgagccaggcgatcattgccaaccgctatgataagtgtctggatgatgtagcagaaaaagtatatacaagagatattttccgcagagattaaaaggtttattgcgtttgtttaaagaagggagttgataccgtatcagtaaatatgttgagattatcctaaccgatttcaaacagccggtcttttatataataccggctttcttgttgagccttgtatttgtggtatcgtttacatttgcatatagggtttacaaaagggaaaaatacccacttcaaagctccgcaatgtggaccctgtttctgtgttactggctggtcctgatccagacagcatttttttccagggagtcgggcagcaggaagcagatcagtctgatattgtttgaaacctggggacacagtgtgcaggctcatgcttattttatagagaacatttttatgtttattccctttggaattttggcgccggttttatttaaacgaatgaagaagatgtactggtgtgtacttgctggctttttgatgtcctgtacgattgaaatatcccagctgcttacacagagaggatatatgcagattgatgatgtgcttaccaatacagcaggggcgatggcgggatggctgatctggaagatcgtcacgcttctgataggctttttgaagtccgaattcacttgaataaaccctgactctcggatatactagtacagaaagcgagaccggaggttattaaaaaaatggataatgattatctgatcaaaaaaccgccgttacaggcgttatttttatttgcgcttcctatgataataggaaacctgtttcagcagacgtatacaatggtggactctgccattgtaggccgttatgtcagtgagcaggccctggcagcagtaggagcgtcttatgctcttacgaatatttttatctgcgttgccatcggtggtggaattggcgcatcggtgatcgtaagccggtattttggtgcgaaggaatatggacggatgaagacggctgtgtttacagctcttctttcttttcttggcatcagtctggtcctgggaatagcaggactgatccttggaaaacagatcatggtatggctgaataccccggcagactgtctggatatggcgtcagagtatctgcggatctatttcctggggctgccgtttttgtttatgtataatgtactttctgctatgtttaatgcactgggaaaatccaggatccctctgtattttctgatcttttcttccatatttaatgtgatccttgacattatcatggtaacgaaaatggatatgggagtggccggtgttgcctgggcaacgctgatcgcccagggaatatctgcggttctttcctttggtgttctccttaaaaatctgaagggactggaaggaaagcagaagaccttgtttgacaaaatggaactggcggaaatgacgcgtattgccatcccgtctattcttcagcagtctacggtttctattggtatgatgttagtacagtctgtagttaatggttttggctctgaagccctggctggattttccgcagccatgcgtattgagtcaatctgcgttgtacctatgtctgctattggaaatgccgtatcttcttttacggcccagaacattggcgcagaaagaaaagaccgtgttgttatggggcttcacgctgcaagcaaaatggtcattgtctgctctgtagtgatctgtttcttcctggaagtattcagtaattttatgatccggcttttcattggaaatgaaggaacccagatcgctctttttacaggaattggttatcttacgtttatgggctggtttttctgtttcattgggtttaaaatggcagtggacggcctgcttagaggtgccggtgatatgaaaatgttcacagttgcaaacctggtaaacctggggatccgtgtgataattgctgtcacctgtgcgccaagatttggcattgccatggtctggtatgcagttcctgtaggctggtttgcaaactgggttatttcctatgcagagtaccgcacaggaaaatggaaaacactgtagtgagtgcaaaaacggaactttaagaaactgttatacactatatgaaagaggtacaatatggaacgttacctgaaattcagagaagaatattcccgtttcttttacagagattatgatgtagaagaaacattaaatgaattaaagatcacttatacatttgaaatagaaggtctttctgtttttacacctacctggacatttccaaaaaatggaaatccagaagcaaaatggatggaagatccccttatggaaaaaatgatcttctccctgggaatggtagagttggtcagctactggaagatcacctgctctccacaggtggtgatcgaggcaggaagtttatcagaagagcagatcctctggtggaaagatctgtattttaatggtcttggcgaatttttctatgtaaataagatcacagaggcagatccggaaggatttatggagatcgtctgcccattaagtgaagaagagtctgcggcaaacagttacgaaaagaagcaggacacagcaggcgccgaacagggcgttcttgttcctgtaggaggcggaaaagactccgcagttacgttagagttattaaaaggtgcagatgtaccggtatttgcctacattatcaatccaagaggggcaaccatccataccacagagtctgcgaaactgacagcagaccatgtgatcagtgtacaccgtacactggataagagaatgcttcagttaaataaggaaggtttcttaaatggtcatactccattttcggcgttagttgcattttccagtgtgatcgctgcaagaatggcaggtctttcttatattgccctgtcaaatgagtccagcgccaatgagagtacggttcagggaagtactgtaaaccatcagtattccaagagttttaagtttgaggaagatttccatcagtatcagaccgatcatcttccaggcagcgcctattatttcagcatgctgcgtcctttaagtgagttccagatcgcaaaatattttgcaaagcagaagcagtaccataagatattcagaagctgcaacgcaggaagcaagacagacagctggtgcggccattgtccgaaatgcctttttgtatatctgatcctttctccattcctttccagagaggaagtaaaggagattttcggaacagatatgttaaatgatccggatatgcagccaaccttagaacagttagtaggaattcaggaggaaaagccttttgaatgtgtgggaagcagggatgagatcaacacagctattgttatgactatagataatctggaaatatctggaaaagagcttccttatcttttaaaatattacaagaccacaggcctgtatgaagcttacaaggcaaagggagatcagttctcttcttattttgataaacaaaatttggttccgactccatgggagaagctggtagagaaaaactgtaaagatgaggcataaaactatgatgatcgaaagaataagaccctgggtccaggggaaaaaggttctgatccttggatttggcagagagggaaaatctacctggaatgtactgaaaaagctggattgctgctctttcgtagatgtggcagatatggcagaaccgaaggaaaagccggaggggatcagaaactggatcgccggaccggattatcagaaatgtttaaatgaatatgatgtggtatttaaaagtcctggcgttgtattagaaaagccggttcagtcttattccagtcagatcctgtcccagacagaactgtttttccagtgtttcagggatcagatcatcggaattacaggcacaaagggaaaaagtacgatcacaaccctgatctatcatctgttaaaggaagctgggatggatacgatcctggtaggaaatatcggtattcctgtgtttgatcatatggaagaagtgggagaggacacaaagatcgtatgtgaactttcctgtcaccagctggaatatatgactgtttctccgcatattggaatccttaccaatctccatgaggaacatctggatcactatggaacactggagaaatatatacaggcaaaacgccatatttatttaaaccagaaggaagaagatgtactgatctgtaatgtacagtgcctgcctcagccgggtacctgcagatctaaactgatcgcagcaaagccttcttttgaagagcctgtatttcagatcccgggagtacctggtcagggagctgtttcagaagaaatggtcaatatctgggaaaaaatggaagttatacaggaaaatgatactacagaggccagatatgacggccattccattgaaattcctgtatcccagatccgccttttaggtcagcataattattttgatattgggatcgcctgggcagtatgccgccttttaaatatcagggacgaggtgttcttagaagggcttaaaacttataaaccgctgccacaccgcctgcagtttttaggagaaaagaatgggattaaatactatgatgactccatttctaccatttgtgagacaacgatccaggctttaaatactttaaaagatgtggacgccgttcttattggtggtatggaccgggggatcgactacagtgagctgatccattttctgtccggtcatccggtaccgtatattatattaatggaagcaacaggaaaacgcatttttgaggagatccggcaggattatccggatttccagaaaatggaacgtctgatcttaactgatcacttagaagatgcagtaaaagaagcgcaaaaacttacaagaccgggccacagctgtttaatgtctccggcagctgccagctatggtatcttcaagaattttgaagaacgtggggaagtttttgcccgtctggtattaaaataagccggaaaacatagaaaaatcacatttttttaagaaaatataaggattttaggacttgtgtaccagaataaaataagatacaatctgtaagaagcttttggaaacgtgaaagggaataatgtgggaacctacgatacgctgaatgatgtacttgtaaatctgtttcgcgatatcaacagtatagaagaaaatgcgataaccagtcaggaatataaagatctgaccaataacgatatgcatgtgatcaatgccatcggggtcgggacaacgaaaaatatgtcatctattgcaaaggaattgtcagtgacggttggtacactgacaatttccatgaacagccttgtgaaaaaaggttatgtgactcgctgccgcagtacgcaggatcgccgggtggttcatatttctctttcggaaaaaggtgtcaaagcttattatcatcacaaacatttccatgaacagatgatacagggagtggttgaggtgttgacggaagaagaattgcaggctttgatcaaggcactgacaaaactgaattcctggttcagaagttttggcaaggatgaataaggaggcaacatcagaatgaaaaaatggttattaggtttacttacagctatgatggcagtttcactggctgcatgtacaccaacaactgaaaagaaacaggaaacaactacaactgcagctgcagcgaagcaggagcagattgaagcacagactaccggcggagccagcgataaggtaccggatccaaatgtagcacctgtagcgatcatttccgtatatcacaagggtgatggtgacagcctggttcaggatatggattctttggacaatgatgaactggatccacaggctctggtaagtaagatgaccgagtatggtatttttacagaaggcacacaggttttaaattttaacatcaccggagaaggcgatgttaagaaggcagtattagacctgaacaaagtggaaaatgatgaaggcgtttctgacagcgtatttctggtagaaattggaaatacctttattgaaaactttgagttatccagcctgactctcaaggaaaatggagcagacctggcaggagctacagatcttacttatgtagctgattatgagaatgtagattaataatgattataaatgatcgtaataatggatcatataaagacaccctgaaagataagatctggtttttcagggtgtttttgtgtttacagacagacatacttttatacacacactgcatacaataagtactgacgtagtaagtcagaactggcaaaaatgggctgtgggaagtgaggagtggaagtatggctggttatcgcaggttgatatcgtatatttatgcatatgaaggagaagaaaaagggaaaaacattggtttcgcgaagctggaagccaggaacggacagtgccgtctgagcataaatgtaaagaagatctatgcagggggcaatgatatgggagtatatttgctgtcttctggtcaggagatctttttaggaaatatttttatccgcaatggcagcggggatttcaggacctgcgttaatgtggaaaatgtaatgggaacaggctgttctatggacagctgtattggtctggtgatccatgaaaagggagaggactggaggatctacaaaactgtctgggaggatgcagtagcccaggctgcagaactggaatttgcagaggttacttctgaaaagaggggagatctcgatgagcttttgaaaaagcacattgaagagctgaaccaggagatcgaccaggcggcagaggaagcagccagggagcttgaaaagcagacattggaacaggaagcagaagtgcaggaaacggaggctcaggaagcaggggctcaagaagcagaaacgcaggacgttgagacacgggaaacaatagaagctcctataccatctgcaccagccccacaaccccagaccaggtccaaaacatctcaaccagaagagatccccttaggcaacccagaagaattagaacgcttagatcaggaagaagaaagatgggggccggacgagctgtggaacaggtttcggaaacattatcctaaaatgcaggcctttgacagtccgggaactgtagagattttgtccatccggccgcaggatatcggccttcttccaagggagaactggggatacggaaataacagttttcttcttcatggttattacaattacagatatcttatttttgcccgtgtgggagatgaaaaacatgccagatccaggtacatattaggggttccgggacattattacagcaatgaaaaatatatggcatccatgttcggctttcctcattttgtgctggcaaagacccagccggcccaggacggccgttttggctactggtatgcagatgtaagaatggaaaatgtagagtaggcgtttctcatttttcagtgtatactaaaacctgtggaataataaatatacagctctgataccgaattgctacgtgctttgcactttcgcaattctaaaaacatgaaagggataaaagatctatggatgaagcagcacagaaaggtcttgtcaccagacagaggcgctgggaagcgagaaatgaaaaacgccgtcagaaagcgttggaagaggaagcgaaagctgcaagaataaaggcagaagacgaaaaatacatgaaggaagccattaaacaggccaaaaaagcagccaaaataggagatgttcccattggctgtgttcttgtaaaagatggggagatcattgcaagaggttataaccggagaaatgcggataaaacagtcctctcccatgcagaggtcacttctataaaaagagcctgcaaaaaagaaggagactggcgcttggaagactgcactctttatgtgactctggagccatgccctatgtgtgcaggtgccattgtacaggcaaggatccccagagtggtcatcggatctatgaacagcaaggcgggctgtgccggttctgtcctcaatttattaaaagagcctggctttaatcaccaggctcaggtcgttacaggtatattagaagaagaatgttctgaaatgatgtcaagcttttttactgagctgcgaaagaagaagcgtcttccggaaactccttaaaaataccccggatcacaaacagggacaatataaaagtggcaatgtctgccagtggctgggcacactggatacctaaaagtcctatggtataagtcatgatcgtaagcagcgggatcaggaaaattccctgacgggctgtagataccaaagtagccctgaaaccgtatccaatagactgaggcatcatatttcccatgatcacagctccctggagaggcagggtgatcaactgcagtctgagagccagcgttccgatttcaataacagtcgggtcattgcgtcggaatagtgtgataatagagcgggctgccgggaaactgatcacgctgagtaccagaaggataatggtgcttacacggatgcagaaccagcaggctttcttcacgcggtcgtaaagtccggcgccgaagcagtagctgcataccggctgaaagccctggccaaagccgataatgacagagttgatgaaaaacataaaacggctgacaatggacatggccgcaatcgcagcgtcaccataaggctgacacataaagttcatcaggatcgtagccacactggcaattccctgacgtcctaaagatgggatgcctccatagaggacctcgcgatagatcgccagtttcgggcggaatttgcggatgctgatggaaatgcagctgtcctgatgattgcacatccataaaaggatacagaaactgataaactgggaaagtccggtagctaaagcagcacctgcagttcccatgtccagagtaaagataaacagcggatccagtgcaatatttaaaagaccgccgactgtaatgccaaccatggcaaaagaagcttttccctggaaacgcagcaggttgttcataataaaagagcagatcataaagggtgctgcaatgaaaatatagtgggcataggcttctgcataaggtgcaatggtttctgttgcgcctaaaagaagaaccacccggtggatgttaaaggtggcagaaacagtgatcaccagtcccatgatgatacctgtaaaaaaggcaatagaaacgatctgttctgccagttctctttttccggcaccaagggaacgggtcatatagttgccgcttcccattccgatcataaatgccagtgcctgtataatggacatggcagaaaagataacgcctacagcaccggaggcgctggttcccagctgacttacaaaaaatgtgtcagccatgttgtaaatagagctgatcagcatactgacaatagtaggcgccgcaagctttggaatgatatggctgatgggggcgtttgccatttcgtaatactgatcatgctttttttcagtatgactcatataaatttctccttaatttttttgttcgttctgaaatttattataacagaggaaaaaatgaagtacaagtgagccttgacaaatgctggtctcacaggtatactggataagcataaatttgtcataaagtttccacgcagccggggagatagcggtgccctgtatctgcaatccgctccagcagaggtgatgccttgcctcggatcggtcattgcggagctgccttatgtaagtggcgttgacgtttgggtcttacgcaacgggaacctgtgaaccgtgtcagggcaggaatgcagcagcactaagcaggaactctcgtgtgccgtaaggcagcctggaccgagttaactgcatgagtaacgtccgtgatgccggtacaaagcaaggcgcgtggattaaatatataattgataacgaatgacccgtctgcgtcagcagacagtggagcgcgatagcgtgggggtcatgagtgactacaagcacaaaaataagcaagcctgaggactgtcataaaagaaatatggcagatttccccaggcttttttgtgtcaggacacattctttttaacttgccccttgaaaatctttgcgttataattgcaaaataggtatagtagtatcattcttatgggcaacaacgaaaaatcctgatttctgattatggaggaaatgcaatatgagaagaattggtatcttaacaagtggtggtgactgccaggctttaaacgctacaatgcgaggcgtggcaaaatctttgtacaatatgttagatgatgtggagatcatcggatttgaagacggatataaaggtcttatgtatgcagattatcagattatgaaaccagcggatttttccggtatccttactcagggcggaaccattcttggaacatcccgtcagccatttaagcagatgcgggtcccggatgaaaatggccttgataaggtagaagcaatgaaacatacctataaaaaactgaaattaagctgcctggtagtcttgggcggaaatggaagccagaaaactgccaatatgctcagtgaagaaggcttaaatgtagtatcccttccaaagaccattgataatgacctctggggaaccgatatgaccttcggatttcagagtgcagtggaagtggctaccaatgccattgactgtatccatacaacagcagcttcccacggaagagtctttattgtagaagttatgggacataaagtaggttggcttactttgtatgcaggtcttgcaggcggagcagatatcattcttcttccggaagttccatatgatatccaggtagtatgtgatgcgatcacaaagcgtaccaaagcaggaaagcgtttttccattcttgcagtggcagagggagctatttccaaagaagacgccgctatgtccaagaaagaattaaaagaaaagaagaaaaacggcgtagtttatccatctgtagcttatgagatcggcgccaagatccaggaagtgacaggaagtgaagtacgtgtcactgttccgggccatatgcaaagaggcggggaaccatgcccttatgaccgtgtgctggcaaccagactgggagcagctgcggcagagcttattataaacgaagaatatggctatatggcagctttgaaaaataatgagatcactaaagtaccattatccgaagtagctggaaaattaaaaacagtagatcctaactgttctatgatcaaagaagcaaaacggatcggtatcagctttggtgaccagtaaaaaataaggagtaagaaaatgtcgtatacggcattatatagaaaatggcgtcctgtctcttttgaagatgtaaagggacaggaccctattgtccagaccttaaaaaaccagatcacatctgaacgtattggtcatgcctatctgttctgcggaaccagaggtacaggtaagaccagtatagcgaagatctatgccagggctgtaaactgcgaacatccggtagatggaagcccctgtaaccaatgtccttcctgcaagtccattcttgcaggaacttctatgaatgtagtagagatcgatgcagcatccaacaatggtgtggaaaacatccgtgacatcagggaacaggtacagtacccgcctacagagggaaaatacagggtttacatcatcgatgaggtccatatgttatccatcggtgcatttaatgcccttttaaagactctggaagagccgccgtcctatgtaatatttattcttgcgaccacagaagtccataagatccctattaccattctgtcccggtgccagagatatgattttaaacgtatttccctggagactatagctggcagactgcgtcagctgactgaggcagagcatatagaggtggaagataaggctcttatgtatgttgccaaggcagcagatggctcccttcgagatgcgttaagccttttggaccagtgtgtggcatttcactatggaaaactgctgacttatgaaaatgtactggacgttctcggagcagtagactccggtgtatttagcagtatgtttaatgcagtgatcgaaggacgtaccaaagactgtattacccagttagaggagatcgtgatccagggccgtgaattaggtcagtttgtaacggattttatctggtatctgagaaatctgctgctggtacagagcgcagatgatgcagaaggtcttctggatatgtcagaagaaaacttaaaacagttaaaagaagactctacaaagacagatggaaatacgctgatgcgttatatccgtattttctcagaactttccaatcagctgcgctatgccagccagaagcgggttatggtggaagtggctttgatcaaacttaccagaccgtctatggaaccggacctggactctgttctccaacgtttaaaacagttagaagcagctgtagaagatctggaagcaggaggtttcagacctgggaccatggtcacggctcccatgggggcagtccctgtaactgcaggtgtacagcctcagatatcaggaacacagggacagatggcagttccagtccaggggggtcctacaggaaatccgcctgaaacagctggcgcagccggtattacgcctccaaatcaggtcagccttccaccggcccagttagaagatctgaacctgatccgcaatgaatgggcaaagatcatacgaagtgctggaggcagcgcaagggcatgtttcagggatacagtggtagaacctggcggagaaggctgtcttaccattgtatttcttgactctatgagctatgatatgggaaggcgtcctacggtgatcggccagttagaacagctggtccaggctaattatggaaaatctatttattttaagacccggttagccggtcgcggagagcgcctggacacaatatacgtgacaaaagaagatctggaagataagatccatatggatattacttacgaagattaaaacgaatttattgaatgaagagatgatgaggaggaacacaccatggcaaaacgtggcggattcccaggcggtatgccgggaaatatgaacaatcttatgaagcaggcacagcgtatgcagcgccagatggaagagacaacaaaagaactggaagaaaaagaatacacagcagctgctggcggcggcgctgttacagtaactgtttccggtaaaaaggaagtagtttctattaagttatctgaagaagtagtagatcctgatgatattgaaatgttacaggatctgatcgttgcagctaccaatgaagcattccgtcagatggaagctgcaaacagcgaagctatgtccaagttaacaggtggactgggcggtgctttaggcggaggctttccgttctaatggactactatagcagtcagatcaccaagctgatcgaagagttatcaaagcttccgggagtgggggcaaagtctgctcagcgccttgcatttcacattatcaatatgccgaaagaacaggtggatgagctggctggtgctatgacaggcgcccggaataatgtgcgttactgcaaggagtgttttacactgacagataaagagatctgtccgatctgcagcagtgacaaacgaaaccataaggtcattatggtagtggaaaatacaagagatctggcagcttatgagaagaccgggaagtacaatggggtgtaccatgtgcttcacggtgccatttctccgatgttggggatcgggcccaatgatatcaaattaaaagaactgatgcaccgtcttcagtctgatgtggaagaagtgatcattgccacaaattccagcctggaaggtgaaactacagctatgtatatcagcaaactgatcaaacctacaggcatcaaagtgaccaggatcgccagcggcgtgccagttggcggagatctggaatatatagatgaggtgactcttttaagggcactggaaggaagaacagagctgtagaagctggaagaaaaggcacagggagatgcataagatggataaatatgagtttaatattaaagttgagcagataaaaaagctggtcaataaaagtgattatgagacagccatgaagattgcggataccattgactggagaagggtccgtaatgtaaatatcctgtctatggtcgcaggcatttatgagaaaaacggagagttccaggaagcaaaagatattctgcttctggcgtttgagagagctcctattggcaaacgcctgctttataagctggcagatctggctttaaaagaaggcaatgttgaggaagcagaagattattacaaagaattctgcaacctggcagcagacgatccaaggcagtatattttaagatatatgatcttaaaggcaaaaggtgcgcctgtagaacagctgatccataccctggagcagtactgcaacgcagaactggatgaaaagtggatgtatgagctggctgaactgtacaaccaggcaggaatggagcagctttgcgtcatgacctgcgataagatcatgcttatgtttggtcttggaaaatatgtagataaagccatggagttaaagcttcagtatgcacctttaaaccagtatcagatggatctggtagaaaataaagagaagtatgaagcaaaattaaaggcagtagagcaggaatacaaaaaaggtacttctattgtacagccgattgaaaatacagaccgccgtcagttagacagggaagaagagccggtggaagatacagcagaagatgagactgtttatgctgaggatgaatacaccgaagattaccgggaagaaccggctgttaccattcaggatgatgatataacagaggaagaaccggtttctgaggagcctgaagaagaactggcagaagagcctgaggagacttacgagacagaagaacctgaaacagaagattatgaggcaggggagtctgaagcggaagagtctgaagaggagccggaagcggatgaagagcaggctgtatatgaaacagcagcagcggatgaagaaatccgtgccagcatccatgaagcccgtgcgcaggaaaatctggcaagagaaatgtcaaaattatctgcagcagcagaggaagaagatctgccggaagatgaaatgggacagaccagagcgcttacagatatccgtgagctgagaaaaggtcctgtttatacaggttccaaccatttgatgatcgaggcagaggttcctgaaaagggacttgcgctggcagtggaggcactgcgtaaaatacataaagaaacaggcgcaaagaaccaggcagcaaagatctccggcgaaaaattaaaccgcagaggtgtatttgcgctggcagataagctgacaggaaaagacctgatcattgagcaggccggtgatatgaatgaaaacatccttcaggaactgaaccagttgatggcaagggatgagacgggtatgaatgtggtcctgatcgatacagcaaggcgcctggaagaactgcaccgtgtatatccgggactggcaaagcgctttgagtgcattggaacttctgacagcataaaagcgaagaaagcagcagctcctgtaccatctgagtctggaaaaggatctctggcaaaggctcctgaagttgttgagaagaaagtacagccagctccaaagccagtggcagcaccaaaagaggcaccggctccaaaaacggcggcaacgaaggcagttgtaacttcgaaggcagctgcgccaaagcctgcagccaaaccagcagcacagccggaaaagaaggcagctgcaccagctaaaaagcgtccggttcaggcaccggctgtaaaagaaccagctcgtatggcagagacagaacagccagagcacagcgagcaggaaatggacattgatgagttcgcaaaatatgcctgccagtatgcaagcaagatcgactgcagtatttccggaaagagtatgttagctctttacgagcgcattgagatcatggaagaagatggcattgccctgaccagagaagaagctgaaaaccttattgaagaggcagctgacagagcggaaaatccatccttctttaagagacttacaggtattttctcttctaaatacgataaggatggcctccttatactgaaggaggagcatttcttatgagaaatataaaattaatagctctggacttggacggaacccttcttaacatggaaaagaaggttcctcagggaaattaccaggctttaaaagaatgtgaaaaagcagggatccagattgtgccggcaaccggaagaggcgtaggcggtattccgcctatgatccgggaacttccaggggcaaactacgccatcaccaccaatggagctgttgttgcagatcttaaaaataataaagcgatcaagacctgtggactttctaacgaaatgatacagcgtatcttaaatattgctaaaaagtatcactctgccacagatccttttatagatggaagagctattacagagccggcatccattgatcatatggatgaatttgggctcagcccggaaatgcagaaactgatccgggataccagggaagttgttccaaatgtaatggaatatgtaaagacaacaggagcagaggcagaaaaggtcaatatttttatggcggacttagaggaaagagaagttcttcgtaaggagttaatggcgatccctgagctgtctatcagctcttctatgtacaataatctggaggttaatgcaaagggcgctgacaagggctccgctcttttatggcttgcagactatcttggcattgaccgggaagaaaccatgtcatttggagacggggaaaatgatatccctatgatccaggcagccggaattggcgtagcaatggaaaatgccctggatacagtaaaggcagcagcagatatgatcactcttaaaaatgatgaagatggcgtagcagctgcaatcagaaaaatcatatttggatcaaatgaaaaatgatgacggaacattggctatcaatcgcagcaggtgtgtttttagtgggaatgatgttatatggtcattaccgcggcctgctgcgtcagtgtgtttctcttggagcgctggtactgacgatcattaccgtgaaagtagcaacaccgtatgtcacagattttgtaaaggcaaatcctgtgatccgggaaaatgcggctcattttattatggaagtatccggatggcagccgccggaggagagcgaaagcattcttccggcggcccagcgtatggcgatcgaagaactgaaactcccacaatcggtaaaagatgttcttttggaaaataataacagtgaattttacagacttttgggagtagatcagtttggagagtatatcagtacctgcctttcagatatgctgatcaatacccttggttctgttctggtatttgcagccagttatatagtgatccatttggtgatccgctggctgaacctgttgtccagactgcctattatatgtggcttaaatcagatggcaggagggatcgtagggcttgcagaaggatttctgcttttgtggcttgcaggatttattctcagcttttttacggagactccaatggggcagatgctggaagcgcaggtaaacagcagtatctggctttcactgatctacagatataatcttatgaatgtgattctgggtagtatcatcaatggtattttatagtacaaacatactgaaaatgaaatagatttaatttagcatataaaatatgcaataacaacaaatcactgggaagtgcatttattcagtgcagatccggtgatttgttttatatttcaatctgttatcaggacctgaaaaacaaggaaaatcctggaaaaacaggtaatgtatagagcgggaaaaaattgtgtaaaaaaatactacaaatcctcttgacaatagctgacggagatgttatattatagttccattgcgaaagcagtggctcaaataaaaaagaatttgagaaaaataaaaaagttgttgacaaaagcaatgatacatgataagatgattgagttgctgatgagcaacaaaaaaataaaataaaaaagttgttgacaaacttaaacaactgtgataaaataatcgagttgttgaaaatgagacaacaacaaagaaccttgataattgaagattaaacagtatgtaaaaccctgaaaattctaaaataaaaggtctggtttagacctttggatttttgagaaaattcagaacaaaaaccaagtaatgaaggtttaggataaattagccaagctaagtaat

SEQ ID NO: 3573 - DNA, 2387 bp, Unknown
  gut microbiota DNA sequence
tcaccgagtgtgggcgtacttattacaccaggctcggcggacaatttcagtcactgcaatgatgaagatggctgcggaaatatgtggcgtatctatgatcaccggacagagggcgaaatccatatcaataagcgggatttggatctggaaaatggggcaaacgacgcatatgattcctatggagatacccagggagatgccacattagaaggagctgtgtatggcctgtttgcagcagcggatattattcatccggacggaaaaacgggaatcgtttatatggcaaatgatctggtggcagtcacgacaacggataaaaatggcgatgcttcgtttatggcctttacggaagcaccaggaatgatctatgactatgaagagggtaagatcgtggaccgtggccagggctggaatgcagcatctccacaaaatctctatgatcatgcagaagcatacgatgagtatacggcggacgcagatgtggtaaggacttatccggattacaaactggcgaatggaaactgctggattggaagaccgctgatcctgggggattattacgtaaaggaattgacccgctctgagggatatgaattgtcgattggaaaccgaatgcagcagcaaaccaatctgggccaggatgtaaatgcgggagttccaggcgatttgaccggttacgctggaattgtgggaatccttaccgcggaggaacagatcagtgatgagtcgactggagatgtggaagatcctgattacaaccagttgttttttacagctgaaagtgaaaaaacaggggattcgggatttgatcttgtatttcgaaatctgccggagggagcaaaactttaccggaaggacagtatttctacgacgaaagaggtagaggccggtacgggtatctatgatgaagtgccagtcaaaaatatttttggcctgccggagtatgttgtggcggaaaacgaccatcagtacccgaaatataatgcagatggaagcattaaaaccaaaacgaccaatgtgaattttactgcgaaaaacgtaatccgtgtgacccgaaaagggttggatcctgcgaaagttacggatgtaatcctggcatctgtgccaggaatgtctgatgatgaacttcttttaagactcgcatctgtaccagatgtggataatgactttgcgcttcttaaaatcaaggtggagcaggcgcttcgcacaaatggaaaaagctcaccgaactataaaagaagcggagttacagcttattcgagcatggatgaattggtattcgaccgcggtgtatgggaaggtgagacagatacctatggtatatccggtgtcagcgctggaagcgcagctgataaaacggtatgcggttctcctcttgtaacattgacgatcaataaggaaggaacagacggagacgcagtatcgttatcttcactgattgtttctattctggattattacaatacccatgattattacaattatggtggagtagattatatcaaagaaaatgcggacagctggacggtcggtttatacgcaaaccggaccaattatccgatgctcttttatgttccggcagacggttcttcgggggatgcgatattttaccgggtagcaagtatgccggcagaccacagcatgcggccaagagctatttatgttgcatacggcgaggatgccatttatgatccccgcggtgaaatgaagaatttttccacgaacgaggacggcaccgtcaatgcgatcctttctcccgctgtacaggcagatgagaacggggatatcgtgaatggtgtcgtaaccgaaactgaattttataaaaccggggaaacacctctggataaaaatggcattaaaattccgaaggtaacctatgtggagcggacagagaaaatttccgtggaagtaaatgaatgcaagtggacggagatccctctcacaaaggaaggtaatgtgtggattgcccatcagactggtaattatacggatggatatggagcggagcataatgacgaggcagcagcacgttatgagtatacgctgaaacttccatcccggttcatttcactgactgagcaggattgcacagattttggaatttcaaaagaacttgccggcattcaggttggtagcgcctcctattatctggcaaaaggttccagcgtaaaagcataccttaactatcgcagccttttagtaggccaggaaaattcttatgtacaatcggtggcccttgattatccggtccaggactatgtatttcaggatggggcagaacggccggggacgaacaccagaaaggaacctgtaggtgtagaagagaggatcatcagtcagcagatcaaagtaacaaaaacgattgatgagaagagttaccgcaatac

SEQ ID NO: 3574 - DNA, 10455 bp, Unknown
  gut microbiota DNA sequence
tcatgcagggaatggagcatcggatcattcggcccagaagcttgataatttccgtttcaaaacctatttgaagtcaaatctggaagcattgtaccggaatgaaaatggagaaattgtatggcaggaccgtatgggaactgaccggacggatgctgagcagcttgccgcaaataaagcatttccaatgctggtcaataagatctatacaaaggttcctcatcagacggatccgctgtttaaaaaatccaatgatgcagcgattgccaatacggctctgtatgattaccataacggtctgatcagtgatgaggcaaacacgggttacacaagactgttggaaatggcagactatcgggtcgaggacggtgacagcacaagaacggtcaaaaattacaattatgagaagttttttgatgcgatcagcgtttccaatggagataaatgggatgaaaatcatccgacctacacaagttataagccgattggaaatctcataaaccgtaccgaagagcagctggataatgccagggtatctgaccgggtgcgtcagtttgcaatcagctggtacctggatgatgaggtaaaaaaactggtgcaggaggtagacgcaggtactggagagaagaaggccagtgctggtgcgacggcatacagtgaagaaacgtatgatctggcactccgccaggccattaaaaaagcagaaaattatttgaagccgttctttgcgtatgatcttgatgagctttacgcaattcactgggatagcgaggcaaacggaggcagcgaccatgatacaacaacactggctgccaatacgatttatggagataaagatctttcaaaagacggtggatatgcctatgggttatcgaaatatttaccgtatggaatctatgtggtggcagagcagcagccgcatgttgatgaactgaaggattttaaaaaccggcattatcagattgatcagccaagggaagtaactttgccgagtgtgtatgcatcttatgatgcatcacaggaaactccggaaacactcaattctttctataattatggccgggctgattccatgcagcagctggaacagaaatatcagatccggtttggtgaggaggaccataagatccaggcccataatcatcatggggattttgaagtttataagtatggccttgatctaaatgagatcacaaatggggttcgggcagaagccggtaactattttgcattgacgcaaagcccatggcggccgctgaaaaattattataatccggaaaatgatcgttctgctgccgaagttacctattatctgacagagggacagagcggcagaaaaggaatttcagaaaattaccggtatagttccctgtctgaagatgcgggactttccgatgacgttccatatccgggtgcggatattacggcagataaccggttaggaatccagtaccgggatcatgttgcaacgatgacaggaatgcagacagcttatgacgggaaatatgctgccatgctggttccgtatagcgtggttgcatcaacggatgaacaggcagaggtgacagatgaagagccgactcagggaggaaacgcaacatatcggggatttgcttacgataagtttgtgaaccgcttctttacggcaaagcttagaatagaaaagattgactcagaaacccatgagaatatccttcacgacggtgcacttttcaatctgtatgcggcatcccgtgatgacagtgagagtggtcagggaaccgtaaaatttacgacagaacccacgcagtttaccggaacaaaagaattcttaacggcaatgggggctatcgacatccggccgattgcaaaaggccggattgcaaggtggattgatcgcattaccggaaaagagaatggcatcggtgatctgtatagtggcaccgtgccggagggcacaccgacctgcagtgaggatgagcagattgtcctgggagatgaatacgggaataagactgtagcctttaaaacctattcaacaaccagggacggcctgatgcgggatgagatgacagacacgggatcttcttatcaggaccagaatgtcggttatttggagctgccgcagcctttaggcgtgggtgtttatgtcctggcggaagtggatccgccagccggatacgcgcggagtaagccaatcgcgatcgaggtttacagcgacaagatcacttattataaggaaggagcaaaggataatcgggtcctggcagtcgtttatgaggatgatgcggaccaccagacaaccaatgcaaacaaaccggaagacaaagtaaacgtggcgcaggtctatgtggagaatactccgatccggttggaggttgaaaaggtaaaagaatcctctgcagagaaagccaatacaacggcggacaagacggtcagctataagatttccggtcgtgtggatggaaaatacagcgagatcggaaaaaatccggacctggtttatgcgtaccgggatggaaaatatttaggatatgcatggcagaaaggaaccctggagtatttagaggaacgcaaggcagcaggagaacaggtggaaattgtctattcccacggaacatttgcgggctatggatatgttaccagaactcttgaaactgcagatgatgaaaatggctacgtagcaggggcattgatgacattgtttgatgcaattcctgtagaacgctctggatttgagggagatgagacttataaaggactgaagattgaaagaaatctcacgaacaatatcaccagaatgtatatcgagcaggggtatgccggcgaaaaggtagagtttgttcgtgaaaaggatgaagcaggtaaagaactggaagtaactttcccggtcggcattgacaaggatggaaactccatttcagctaccggcggagtatggtctgcggttacgttgcagcggccggatacagatattttatattatgacctggatggactggatccatatcaggagcgctatattgacggacagttcattacctatgtgtatgacagaatgcacaaactgacgcctgtggaagaggcagaacgggaccgcagaaatttcgcaaagagtgacagcgatcattcaatgtatgtctttaagaatggagttccgtatttagagattacagaaggcgattttacaagggtaaaataccgtaagaatgataagcagcttgaagtggaggcaggcaccaaaatctatcatttggataaagacgggtaccgcgatgctttggttgatccggcaacaggaatggcatatatcgaagaatactgtgaagacggaacggtaagaattttggtatggccagtcaacgtaaggaaggatgaatttggaaatgtgattgctcgtgataaggttacgacttcccgtattgctacggtgggcgaaaataaggacggctatgcagaggatgaaacgctggatgtggtaaataattccaccgcggagataccggatgcggataaaccgtcgtatacccatacggagtccggccatattactggaacctggaaaggaaatggggagcaatcacacgaagagagtagcattgagcagaaccgttttaagcaggatatgaatggctctgtcctggtagatgataataatggtgatttcttaaatgaactcaatccagtctatgatgaccatggtttggttttgtattaccagagaagttcagaaacctacaaaaagggtgaggatctttatgaccgaaatggagattttgtcagacaccaggattcagataatctggaagaatataaccagaatgcgtaccgcatcaatgaacacgatgaactgtatgattcttcctgggatgaagagtctccgaacaggaaaaatctgtatcacaggctgggtgagggatacatccttgaaaacacctggctcagctccgacaagactccaaatgatccattcgatacgttccaaatggacagtcaggcagatgttttaaaacgccttccgagcggaacctatattttggaggagttaaaggcaccggaggggtatgtgaaggggctgcctagcggcattactgttgcggagacgggagaacttcagcatgttcagatggttgaccggaccacaaagattgaaattagtaagatccatgcgccgcaggataccaaaatgacagttctggatatggaccatgaacatccggaaacgggagagaaaccgtatgagcgcgaggtggtgactggtgatattgcttcctatacatacagttctgttcctggagcaaaactggcgctgtatccggccagacgggtatatagtgtggatacggaaaaatatccaaagggatattatatggtaaaaacacaggatactccactggtttgggaagattcaaacagtactgcttccaatccggtatggaatactgcggagtgggtaagcggaaatgaaccggcctatttcgagcggatcccggcaggagattatctgctggaagagattgaaacgccggaaggttttgtgacagcagatccagtggaagttacgatcggtgatcagtcagaagttgaaattgcctgcatgaagaatgataccacaaaggttgagattgaaaaattctttacagatgagcatggagaaaaagtccagctgtctggagcagaatttagtctccaacaggcagtggtaaatgcagaaggtgaaattatttacgatgtggatggcacgccggtatatgatgcccgtgttctggcatcatttaagagcggcaccgttgagaattatcagaatttccgcgatgcatttgaaaaagcgtatgcgtcctatggtgtggatctttcactgtttggctggaaggagaatggacaggaaaaatctgcaaccgtcacatctaaaacagtaatggatgcggcaagcgccggaggaagtcatgaccgatttgcaacgaaagcactccttaccatgattacaagcgacggggagactatacgcgtggcagtatctggcaatttgccggaaaccgtctttgattaccagtttgattatcagaaattggagcatataaatgcttatgcggatacctaccttacggacagaggcaccagaaggatcaatggcctgcctgcagggaaaaagtatgtccttgtagaaaccaaggctcccgatggatttttaaaagcagatgcccaggtgatcgtagtggagaaccggaaggagatccagcagtatcacatcgaagatctggcggggcagatctggctttctaaatctgctgttggtgtgaccggggaactggctggtgctgtcatggccctgtatagagcagatttatcaggaaatctgaaccagtctgaggagtatctggtcagccaatgggtaaccggagcggacggcatttatacagtgacagataaagtaaatggcaggatcccggaaggatatcaggtgggagatttaaggcttcatattgaaacgggcctggcagaaggtatctattatttagtagaactgtcagcaccggattattataccttagcagaaccggtacgatttgagtatcatctggatgattcggtacagacgatccgggcagtcaatgaagcggtgaaaggtgcgctttctatcaccaagactggagaagacggtcagggacttgccggagcgacatttgagatcaaagcctataaaggggatgaactggatgagccggtttccacaaacatgatctatggaacagaggcagtcatcatcgtgcaggatcttcctgttggtgagatgcagccagatggaagcatcattccttatacctatacgttacaggagattgcagcgccggagggttatagtgtaaatccggaaatcatcacctggcagtttgagccgaaacagagtgacggccagagctttgcccatgagacggtagtaattcatcaggaaagcgtaaaggatcagaagaccaggctgtattttagtaagcaggacttcgatgctttaggggatgacaatacagaaggtgcttttatagatggggcaattctttccatttatgaagtgacaggaaaagatgaacacgatcagcctgtatatgataaagatgcaccgtttacgacctggaccaccagaaaatcggagaagaggcatgaggttatcggacttattgcagggcatacctatattctggtggaagatgctgcgccaaatgggtggaatctgatgaagccggtactgtttacggtatccagtgatggaaggagtatccagggcctttctaaccagatggagagtattgaaatccaacgggtatcaaagaatgattatgaattggatacgattaatcgtgataccacaagcattgagcaggtaaaactgaagggccgttatgtgacccagatatattatgagttgacggacgcaaacaaagacctggtagaaagctggatcggtgtcggcgagaaacatgtgataagaaaaccgctttcttccgtgtcagaaggatcggcctataccattacagagtattgcagatattccgacggaaccattcttgtgacggatcggttcaccaaaacattctggtttgatgaaaatgaagagattaaaattccaaccagagaaattgaccgtgtaaatgtgaccttatcttatgcggacggaaccaagatcactgcgtttcttccagatgcggacaatcaggaaaagcaagtgaaaaatcctctgcagaaagatgatctggtaataaccagactgtctgcggatggcgccagtgcattagcgccggaccaggcaatttttgaaagaatccgcgtgatcaacacggatcataaaaaggcggatatggtattaaccgtgactgtcgatgcagatacaagcatcattgatccaggaacaggaacttttgacggagaaaaactggtattccgttttgagagcgtggcgccaggtgaagctgcatacgctgcttttacaacacaggtaagtggtgaggcatctacgattaaggcaaaagcagaatataacggaattgtaagggaaacccaaaagacagtgccggtattaacttatggaaaggtagtattgttcaacgaacttacgggatccggaaaggagaggtataaagatcagaaaacatcatttagggtaaaactctatgacacatcgacaggaagggaactttcaggcacatattcatacagcggcagcaggaccggcatgataaagagtggtgataccatcagcctctctggtaatgaatatgtcaagatcgatccgggttactataaaaatgtgacctatgagattgaaaagatcgagaatggcctgcaccatacggagaaaatgacgtccggaagtgtagatgcaactcgcggaaacggagccagatttaccagaaatattgaggatacggcgaaacgcacgatatttaagccgggagaaacctatgtgcttatggaagaaaccgtattcgcaaatggggacagccttccgacaaataagatcagtacaattctgggccagtctgtgaatgttgagggcattgcagccgcggaccggaaaaccaaagttatgatctcaaagacggaaattggtggtggtaaagggcttcctggctgtgaaatggaattatacgatgaggaaaataacttgattcacagctggaccagctctgacgtagcggaaagccttgaagaattcctggaaccgggaaagacctatagactggttgaaaaaagcccggcacctggatattcctatgcggaagatgttacctttaccgtaaatgaggatggtacggtggaccgggtgatcatggtggataagcctactcacatcgtgttatctaaaaagaagatcacaaacagtgaggaacttccgggtgcgctgcttcaggtcgtagataaggacggaaacgtagtagaggagtggatctctacggaccagccgcatgaaatcgttgcaaaactggtagttgatgagagttatgtgctgcgagaggttcgtccggcagatggttgggcctatgcggaagatgtgccgtttaaggtaagtcatgacggaacggtcgattatgtcaaaatggaagacaagccgacgcatgttgtaatttccaaacaggagattacgggaagcaaagagctgccaggctgtacgcttcaggtcattgataagaatggaaatgtggtagatgagtgggtttctacggaccagccgcatgaaattaaggagaagctgatcgcagatgaggaatatacactacgggaggttcgtccggcagacggttgggcctatgcggaagatattccgtttaaagtaagccatgacggaacggtcgatcaggtcaaaatggaggataagccgacgcatgtggttgtatccaagaagaaaattacgggaaaagaagaacttccgggctgtcatctggtgataaaggataagaatggaaatgtggatgagtggacctcttcgacgacaccacacgaaatcgtagcaaaactgattgccggagaaacttatacacttattgagatccgaccggaagatggctattcggttgcggagaacattgaatttacggtatccaaagatggcagcattgatatggtggagatgttcgatgatgtaacccatgtagaatttggcaaggtaaatccaaatggcacgcttcttagtggcggccggatacagatcaaggatctgtacggaaatgttctggttgatttcgtgccagacggtacggtttaccggattgacggtgtactgaaggccggagaaacctatgtcattcatgaagtatcagcccctggtggataccgggtatctgaggatcaggagtttattatgccactgggtcaggaaacaaaagaaatccgattcgtgaattatgcaatcagtagcggtggcggcggaggtggcaccactccgggaaaacgtcaactgtccattcgcaagtacgatccagtaaaccagatcggcgtggccggagcagagcttactgtttacagtgtggatggaagcctgtacttaaaagggattacagatgagagcggatatctgatatttactatgccgacagacggaacctatacatatcaggaaacagaggcaccggctggatattacctgaacccgaccgtgcagtacctgtatattaaggatggtaaagtaaccaatccagaaaatcggaccttgtatgattatccaaatgtggaggtgatacttgaaaagaaagattcagaagacggcacagcggttccagatacgctgcttcaggtgactgatccggacggccaggtggtatttcatggcagaacggatgaaacaggagagtgcaaggttctggccggtaaggcaggaacttaccgtatcgtggagatcgagccggcaaacggatatgagcggtccgaagcaccatggcagttccttgtttcatatgacggaaccatcgctggggaaacaacactttataatgaaaaaactgataaaaaggttggtatcgggcggatctatgcgcattatgagagcacgaatggaagcagcggatcctatggattgggtgttccagactggctgaagcaaccgaaggcaggagatactacagattcattcaaatggtatgtactggcaaccatctttgcgataggcgcagggggactggtgcttatcggacgaaggaaaggaaagaaaaaagatgatgaggcgtagatattttagcgccctgatgtttacggcggtactggtatttgccagtcccgccgggaaaaccatggcgagtcaggtatcagaaaaccaaacgcagagtattgcagagaatgtgaatgtagcggtgccttctgaggcagaaaagcaggttagcggcgcagatgatgcgattaccaccgtggaagaagtatttggagagcggccatattacggttcaggagagacggatggaagttatgtatattattcacaggtctttccaaaggatgcggatcaggaccaatatctgcctgaggaagagcatgtggaaggtgatgatacataccggttagtggattatgaggtgaaggaacagtctctttcaggaaggaagaagcatatccgggatacgttactactgaaagattatgaggggatcgatgagattccggaaacctataaggtagaaattgcagataatccgtttcaaaccgtaacggaatatacgttgccgatcaaagaggcagagcgggtaaatgaacgctgggaagattcctttacgtttgatattgtcgtagaacatgcagactcaggactatttcagattggaaatgaggtgatatcacttaatcagactgtggatccgtttgctggtaatgaagggcttttattagagctgatcggggtgccgaatgacgcataccagattgatcacacggcctgggccggtgacatgtatgagcagaatgggatcctgtatcggaatgcagtcgcttatgggaaaaagc

SEQ ID NO: 3575 - DNA, 26045 bp, Unknown
  gut microbiota DNA sequence
aggtttacacaaactttaggatactcccccaccatacagcctactaacagcatgatcatggcagctgttgcaacctggcgtaccccctctgccattgctgcatccagacgttcccacttaaatcccataaacatacagaatccgatcattacaaacaacgctgctaaagaagcgatcgtcatttctgccccaagaacgatcagcacgatcattaccagaattggcatcaggaaacctgccaatgcacaaccggtcgtcatttctcttaaccccttagaacctttttcactcatcttacatcgtcctttcaacacattttaagaaacactgcttatctatttattttcttttaatgcaacacggatacgctccaatgcctcttttaatacctcattggtcactgcaaaattgatccggataaaacctgcaccttcatttccaaaattttccttcccgtcatccagatggatatgtgtcttttccatgaaaaaccgggctaaacgctctgtcccaattccggcttgtctgcaatccagccacagcagaaagcttccctcaggtacataaggcaccaacggcagtttatatttatgtataaattccagcgtctcctccagatttttatgcagataagcagtcagttcttccagccattcatctgcctcaccattcatgatggaggtcacagcagcaatcgaaaaactgtttactgcataaccaaatccatatgcctggatctgacgcatccatgctgcacgcatcccaggttccgctactgtaataatggcatgaggcagactcataatattaaaacctttgctaaggcttacgatctgaacactgatctcctgagctttcctgctgacagccagaataggaatatgtttattctccccgtaaagaaccagacaatgtacctcatctgatataatgcgcacaccattttcatagcatatatccaccagtcgctctaattcctcacgggtgaatacccgccctgtaggattatggggatttatcaacagaaaaatagatggatgatacttatggatcttttcctcaaagtcttcaaaatctatttcataatggccatccactggtttcagcggattttcgatcagctgttgatctgccccttcaaccgcattcttgatcggtccaaataatggtgtctgggcaatcactgtatctcctggctttgcgaagatgctaagtgccattctgatcgctcccacggtacttggaacattgctcagccattcccgttcaactgtcaaaccataatttcgtttataccagcctgtgactgcatcataatatgcatctgtatgctgccggtaattgtagcagttttcctccgcaatgggcaaaagtgtctctcttatacaaggtgcgcagtaataatccagatctgctgtccccattccaattacatctgacggcatatccgccatgccccagcgaaaagatgcatttgtcttgtgatctggtgttgtgtcaaaattatacttcatatagtttgttctcctccctgttttcgcccctaaacgaaaaccatggctttttaatgtttacaatgacgcttgcaaaacgcgatcagacgttttgttccttcctgcagattttcctgggaagttgccaggttaaaacggataaaacctgcaccgccttttcccaaacgaaatccattttccactacgatctgcgtctcctgttcaagcagataggtaagctgcgccggccgtatatccaatgcccgaagatcgatccatgcaaaatacgtggcttctgcctgcaggactttacattccggcatatttttttcaaaagccgccttcaaaaagcgatgatttgcggcaatctgttccatcaaccgtatgcgccatggttcacattccctgaatgctgcgatggttgcctccagccccattaaattctggccataacttactcccattgatgtaagcagctcactataccgcttcgtaagctcaggattttctgataccataaaagcatggcgcaatgctgttgtattataggtcttgcttgtagaataaaaagtgatcgtgtgataagagatctcctgtgaaagcgatgcgatcggcgtatatggtttaccggcatacgtcagtccgcaataaacatcatccgataatatcgttacctgatatcgcagacacagatctgcaatcttttttaattcttccctggtccaggcccgtcctaccggattatgtggattacacagccacagtaccttagcaccactggccagacaaccttctaaaaacgaaaaatcaatctcataaaaaccgtttttcagcattaaaggacattctaatgttttcctgttgtttaaagtcagtaattctttaaaaacggaatgtaccggtgtcagtattactactgcatctccaggctttgtcagaagctgcagcgctccccatgccaatacataaacaccggaattttgcagcacacagcatcgggtatctacattccagcctgcaatatgcaaaagccagttatgtattgtctcataatacagatccggtatctttggataccccaaatgccctcgctccaaaacagattttaatgatgcaagaaccggttccgggctgcgataatccatatccgccgtaccaaagcaaagcagatctggacaggatgcacgttctctttcttcctcccatttcaaccgcagcaaaccatcactttttacaatctcaggatctggatagctcatctgttgtcctccttacgttttatgatattattatatagactaaacttttgtaatgtcaatatgaaataatttagtctaaatcgtcctgttatttcattgaaaattcattttatggatgataaaatactgataataaatacacttaggaggagtatatgaatctcacaaaaatagatcgtcaaatcctggactcctatgcctcaatgatcgaggggctttccatgtatctcggttccgtttacgaaatcagcctccacagtttagaggattatgatcattctgttgttaagatcatgaatggatatcactctggacggacagtgggagcacctttaaccgatctggctctcaatatgttaaaaagaattaaagaccagggaatttcctccggtaaggattttacctcctatacagctatcaatgcccttggagaatccctaaaatcctctaccattcccattttagggcaaaataaccgtgtgatcggtgttctctgcataaatttgtatctggattctccattgtcagaagtactggaatccattacagggccaaaagatgttcacacagaacaggaaaattttgcaaacgatatgaccgatgctttcaccgcatccatcaacaacgcccgcaaccaggtaatgtcaaacaataatattgctgctgttaataaaaacaaagaattgatccgtatcctgcatgagaagggatttttctatatgaaaaattcagttcccaaggttgcagctgctcttggaatttcaaaaaataccgtctatcttcatttgagaagcattgaaaataaagagcaaaaagaggtgtaaatttcagtgtagcccaaaatcgtatttttaggtcaattaaaaacagcctgaaaaattgatatacttccgtcaattttccagactgttttatttttatgtcattctaaaaaatgctttttttcttaattattttaacattaaaaggggatataagaagccgatccatactaccatcagcgcaccgccgatacgggtggaaatggaggagaatgctaacaggctcattctgtcacctgctgtcagcactgcaaggtcaccggaaccaccgatgttgcagcagcaaagacctgctgtaataccggcttcataaccccacagaccaaaaagttgtccaaagatgatggctccaatgtatgcaccaagaactgctaaaacaatgataactaaagctgctggtgtaaaatagctgatcatagtttcaatactaatagagttaatgccgatacctgcgatgatcgctggcagcagtccctttaacataaagttcatgccatttactgtgtagttggtgatcttttcatccataataccggtgcatttgaccacaacagcaatgatgatcgcccatgcaagaccagcgatcactttggttccgggaagcttgcctaaaatagttcctaataaatagatgccaaggcagataaagataccgccgcagactttggcaggatccgcactgagggctggaagctgctcagtgctttccgtctgcatagttcctgctttgcgaaggatagccggattttcatctggagataccatccccagcttctttaaaattggtttggaaagggcacacattaaaacagctactacgttagaaagtgaaacgtagcataaaaacataccggacatgctcatccagtctgtaccagaaagatccgtatacagagtaggaatagttacaagagcaccgccggagccgccggacatagtaggcgcaccaatgtcaaagatagcatttaatgggccatatcctgtgataagaccacctaaaaagcagaatcccagtgcaaatacctgagagcctaaaattgcaggcagataacgtgaaatagcacctaataagatcttacggtccatatacaggacagatccgcaaagaagggctgcaatgtatacgtcctgaaagccgtatttcataaggatagatacgccttttacagttgtttcaggaagcagtccgaaataatttaacaatgccggtccgaacatacagaaaagaacagagccgcctaagtagctgtttacaatggggatactgttgcccaaccagaaaaacaggccgcctacactcattaagaaggccagtgttcccaccattccaacaccggtagtctcaccgatctttacagttggcataaagccgccgtaagtacagatgatcactactaaaaacagtggtacgaagtactttgctgtaagtccgcagactttaaattccacttttttacccattttgatttcctcacttgtattatataattttgcagataccaggatcaaaaggtctaaaatccgatgcaagcttgcttgcaggaggatttttgaacttggggcccgccaaaaacatgagtaaatagccattttttgaaaaaatgagcggattacaaatgtttttagaattgcaaaagtgcaaagcacatagcaattcggtatcagagatcgcggagaacactaataaacttccgacggatccgcgattttccctttgatcgcagatactgctgctacctctggtgaagacagatacgcttttgcctttggtgagccgtagcgtcccaagaagtttctgttattggttccaaggactacctcatcatcagaaagcaggcccatggtacgtccttcacagaaggaacagtatggcggtgttaccagagctcctgcttctaccagtgtctggatatatccttctttcatggctgcttccataatactgttggaagccggggtaacgatgcattttacgtgggaactgatctttctgcccttcattacatttgcagcgatcctcagatcttccaaacgaccgttggtacaggaaccgataaatacctgatccagtctgacgcccttcacctcagacaatgggtgtacattgtccacatatggaggacatgacaataccggctccagattttctgccttgtaggtaataatccgttcgtacgctgcatcctcgtcagctttcacccattttacatcctcgtagtctacgccgcagtaatcggcacatttctggtccgccgcaaaaagtcccgcttttccaccgcactccacgaccatgtttgcaatggtcatacggccgtcaatgcctaaagcatcaatagcacttccgcaaaattccagtgatttgtatgtaccgcctgctgctcccagatctcctaacacacgcaggataatgtcctttgcgtatacatgaggcggaagcacaccgtcgatctggatcttaatgctgcttggcacacgcagccacatctggccagtgccccatacagctgccatttccgtatatccaacaccggtagaaaagcagcctacagcgccgtaagtaggtgtgtgggagtctgttacaaatacgatatcacctggtttggaatagcccagttccggtaccagctgatgaacgataccgcctgctgcatggaaatggcggatgccgtattcttttaccagctcatatccagcttccaggcttcgtggatctccctccagacatgcaggcatcaggtgatcgtgcatgatcacgatcttatctgtgttccacactttggtaagacccattttcttcattttatcacgaaggaaggctgtgtaaatatcatggaccacaacgcagtccggctcaactaccaccagatcacctggttttacatctttgccgccaatatgcttcataatgatcttttcagctaatgtatgtcccatttttctccctcctttctataacagacctttttcaacttttttcataatgctttttaccagaccaccatccataatgatgtggtacaggttttccgggatagccggaatcgcatatgttttaccatcagcagtgatcttctggttgtccagatctacctgaatgatatcaccttcctttacgtggtccgccagatcctggcattcaagcagcaggataccattgttaatggcatttctaaagaaaatacgtgcaaatgacttggcaatgacgcagtggacaccatttgccaccagaacctctgccgcctgctctctggaggaaccacagccgaagttgcttcctgctacgatcaggtcaccttcccgaagcttcgcagacagatccggtcttaaaggctcaaatgcatgggttttgatctcatccattgtctcataatttaagtgctgtgttgggataatgatatcagtgtcaatatcatcaccaaacttccagcagcggccctcaaaggtaagggaacgtgtttctgtcttctcttcctctgccggagcttcttccttatagcctaaggttccaagaagagctgcctctaccgctgcctttgtggatgtaagataggtctttgaggtctcaaaaccagcataaccaggtttattttccaggtcattggataccatgacttccgtctttccaatacgtccctgaacctccggactgccgcagtgattaatcaccaggccgcctgcttccagcacatcggtaagatatccggcagttgccgccttaatatatgtatctgcatctgcaggtgctacgatcaggcgcaatccataggcgatttttcttccctttaacatggaagctgcctgagccagctcttttaaggtgccgccagtggttccgccgataaatacgcttttgatctttactactgacagttcagagagcggtttgatctctgtgcagccacctggaagtgctgttacttcccgggttttagctgcatcaaagatgtatgtacttgtttcgctgtctgctgtgttcgtattgaatgctgccggttcccctgttttaacattttctgcattttctacagcagcggttactgctcccgcttttccaagaacaccgcaaattgtcattttatcggacagatccagactctttaatgtatctcctgtaagtatcaattccttaccagagaccacttcttcccccagttctttcaccaggctcagagccagatcttttgcagaaagtccttccggcagatttcccgttgtttttacaacgtttttcttgctttcagaatcttctgcggatctctcctgtgaaagttctcctgtttccagtacctgctttaactgtactgcatctgccaagaatacctttgccccaacggccccggctgcaccagctgccttatcacagacaactgcactttcgtcagcctttaaaagtccatttgccagcagttctgcgcacatgccttttccataatagaagtccagaccttctttttctgccttttctcttaaggctttatggagcgcagaaacctttggcgaatttggcggtacgatctggtcaataacgacaactgtttttactgccggtctctggtccatatccagaaatacctgtgccagatcatcatcctgtatcacacacaggtcgattttctgcatttttacatttcccattgtattttacccctcttccagttcctcaaaaagttctactgccgggataatggcagacgcaccgtaataaaagaataccagacggagcacttcgccgatttcatccatggtagcgccctttttcacagccagttcaccatgtgttttaatggtaacagagttacctgcgcagcatcccattaacattaacatcagttccatgtatttagccggaatatgggtaatatcctgtttacagatagcaaactgctgactgaacgcctgcaaaagctttggatcatttgccatttttttgtggatagaaaggacatttccgcctctctgtacttttaaacgctccagaatctcttctgcctgggtgatcttttctttatcttcctgtttcatattttacacgtctcctttcagccacctgcatcaggtgatttatcagcactctatcaccccaaaaaggggtgatagaaactttctattgatacttcttctgtaaaaatgccggtgccagttccgggaacaatgcataagtcattacatcttcttcacttctggcaagtccagcagtctctgtctttgctttttcccagcctggctcaatcagacttcccggacgtttggtattcatttcgccatcaccaaggaccgctgcttttaactccggtgcgatctcaccagacggacggccatacataccccggatataggtcttgctttcattggagatcatcttgtagcgctctcctgtgagcacattgatggttgcctgggctcctaccatctgggcaaatggggtggcaagaggaggataaccgaagtctttatgtactctgtgtacctcttccaggacctcgttcatgcggttttctgcattcattccctttaactggctttccaaattagataacatgcccccagggatctggtgctttaacacactgatatctacaccggtacgtttacttgcatattctttatatttctcacggatcattttaaaataatcattgatctgggccagaagatccatatccagatgaggatcaaatccggttccctttaaacaggtaacaatactttcaagcggcggatgagatgggcctaaagataaggaggaaacatcgcagtctactgtgcaggcaccagccttaatggcctcccagtaacagatatcagccatgccaccgatgcagtgtgcatgaaaatgaacaggaagtcctacttctttgcgcactgcgctgatcacatcagaaacctgctttggattcatcattcccgccatatcttcaatatgaatagcttttacgcccaatgctgcgtagtcctttgccatctgcacatatttttccaatgtatgtaccgggctgatggtatagcagatatttgcctcagcaaccttgccgtttttaacaactgccttaatagctgtctctgtatttctcacatcatttaagccgtcaaataccaggaacttgtcaattcctgcttttgcagccagttctacaaacttctccacaacatcatctggatactgcttatagccgatcaggttctgtccacgaagaagcattcgcaacggtgttttcttacaaagcttcttaaactctcttacacgatcccagggatcatcccccagataacggatagccacgtcaaaagtagcaccgccccacatttcaatacactcatatcccacttcatccattttaggcaaaataggaagcatatcttccgtacggatcctggttgccaggagagactgctgtccgtcacgcagctccacgctactgatcttgaccgggcgttcaggaactgtatctgctgattttttccagaaaaacatgtatatatccccctatatccgtttgcatatcataaactgattcattcatttcgttatcaattgttatttttgttaactgtgacgttaatatacaaacttatatcttggtattattggttaaattattaactcttttcttttaaaaatcatacatcttttcccaaaaattggcaacaaaaatctgccatttcccctgttaaaactatttttgcccccggatatttcatatcttctgtactaattttagcttccaacaccttttctattgcattttctactgtttttgcctctttctccagtccaaagctgcaccgcagcatcagggccgctgccatgatcatccctataggactgaccttctgttttccgatcactgactcatctggataatgaagctggttaggcgtataaagtccttttccggatacggaaagttccgcagagccaaaaagtccggcagttccagttaatccggttccttcatcggagataatatccccaaatagattggcagtaaggatcacatcatattcccagggacgacggatcagtttcaaggccgcagaatcaatatattcatggctcagttccatctccgggtactcttttccgatctctgttactgttttccgccacaatctggagcttcccagtacatttgccttatcaagacttaccaccttatttcttcttccttttgctagttcaaaggcaaaacgggccgtatcttccacaatcttctgattataatattcatattcataagcttccgggccatgtactccctttccttttacctgttctgagcatagtactccccctgcaatatcacggacaaataaatagtcaagcccgcctgagagagcatttttatttaaaggggaaagctccataagcgccggatacaaccgcaccggccgcagattggtggtaactcccagttcttttcgcagttttaaaagggcatattccgggcgcttggtcaaaggctcatttttatatttttccagacctgtatttcccagaagaactgcatctgcctgaaggcacttttttaaagactcttttggaagaggttctcctgtttcttctatagaagaagaacaggccttaacgtgagtaatgttaagtacatgaccatatatttcacacactctctttaagacctgctcagttgcctctgtgatctccggaccgatcccgtcccccggtattactgctatatttatttccatatttttccattttcctttctgcaaatatgtttaactacatgtgctgccgttggcagcacaaaataataacaaaaaccgcccaggaccggtatccgatccattacaggtcggaccggttctgggcggtcacattatttattcacttatcattcacttattcaggattaatatttaactttttcgttgacttattctttaacttaggaaggttaatttgattttattatggcacttttacacggtcatttatttcagcattaacattggatacaggaagccgatccatacaaccatcagggcaccgccgatacgggtggagatggaggagaatgctaacaggctcattctgtcgcctgcagtcagaactgccaggtcaccggaaccaccgatgttgcagcagcaaagacctgctgtaataccagcttcgtagccccacaggccaaagaggtgtccgaagatgatcgcgccaatgtaagcgcctaatacagccagaacaataatgaccagagcagccggtgtaaagtagctgatcatagtctcaatactgatagagttgatgccgatacctgcgatgatcgccggcagcagtccctttaacataaagttcataccgtttacagtataatttgtgatcttgtcttccatgatgccggtacatttgatcacaaccgcgatgatgatcgcccatgcaagtcctgcgatcactttggttccaggaagcttgcctaaaatagttcctaacagatagatgccaaggcagataaagataccgccgcagactttggtaggatcagcactgagagccggaagctgctcagatgcctctgtctgcatagtgcctgctccacgaaggatgccctgattatcttcaggagataccatacccatttttttaaggatcggtttggaaagagcacacatcaggatagcaactacgttagaaagagaaacatagcataagaacataccggacatgctcatccagtctgtaccggaaaggtcagtgtacagagtaggaatggttactaaagcaccgccggaaccaccggacatagttggtgcgccaatatcaaatactgcatttaaaggtccataacctgtgatcagtccgccaaggaagcagaagcccagtgcaaatacctgggagcccaggatcgccggcagataacgggaaatagcacctaataagatcttacggtccatatacaggacggaaccgcaaaggagagctgcgatatatacgtcctgcagaccatatttcataaggatagaaacaccttttacagtggtctctggcagaagaccaaagtaatttaacagtgccggtccaaacatacagaagagcacggaaccacctaaatagctgtttacaacaggaatactgttaccaagccagaagaacaggccgcctacactcattaaaaacgccagagttcctaccattccaacaccagtagtctcaccgatctttacagttggcataaaaccgccgtaagtacagatgataatgactaaaaacaacggtacaaagtactttgctgaaagtccgcagactttaaattccacttttttacccatatttttcctctttctacagtcgtcccctaaagcaagaggggacatatagtattttgcttattcgtaaatcttagcttcttcttcccctcttaccacacgcatagcgccttcgtaaagagcctggatctcgccttctcccggataacggtatacaggtgcgataaaggatactctgtctgtgatccagtcagccatacgcttggaataaacgataccgccggtcagtgcgattgcatccactctgccgtttacagtggtagcaagagcaccaacctcttttgcgatctgatatgccatggtctcaaaaaccagctttgcatactcatcgccgttatcgatcattgcttctacagctctggcatcattggtgcctaaatggcttacaaatccgccctttcctaccatggtacggtaagcttcttcataggttaaaccatgattgtatgccagatccagcacatctgcatttggcagtcctccggaacgctccggtgacattggtccgtctccgtcaagaccattgtttacatctactaccttgccacaacggtgcatgccaacagtaataccaccgccgatatggcagacgatcacatttacctcttcgtaggtctttccaaggactctggcaacctttctggcaatggctttctggtttaatacatggaactggcagactctttttacttctttaagacctgtcattcttgcccatggccacagctcatctactactaccgggtctacgatataggatttaatgcctacacggtcagccagatcttttccaataagagcacccaggttgcaggcatgttcctttttcggatgcatcatttcatctaccatgatgtcatttacttcataggtaccacctggaatcgggtggagaagtccgcctcttgcggaaatacagatcagttcatccagtttgatacccgctttatcaagaacatttaatatcttttccaggcggtattccttctggtcctgcacatgggcaaagggagccagatcttcgtgggaatgctggatactttccaggtggatgatctcatcgttgcagtaaactgcgatcttggtggatgtagaacctggattcaggatcaatactttatctttcatgtaggtacctctttatttcttgtccttgtttcctgcgatcagcagagcaagggcaatactgtttaacttggtttcaggtgcatcagaacgggaagtaatgacaaccggtgctgcagctcccatcagtacgcctgcgatttcgcatcttgccatgtataccagagtcttccacataatgtttccgcactcgatatttggcataagcagtacatctgcatggcctgcaaccgggctcttgatgcctttgtgacgggctgcatcttcatttaatgcattgtccagtgccagaggtccgtctacggtaattcccttaaactggcctctctggctcatgatggccagggaagctgcatccagtgtaggctgcatggaaggatttaatacctctactgcacacacagctgctgcctttggatcttcgatctccagtgcctggcatacaggaatggtattgttgatcatggcgatcttttcttccagtgttggatacatgaccatagctgcgtctgtcataaggatcagacggtctaattttacagagtcaaatacagccacatggcttaagatcttgccggtacgaagtccccattctttatttaatacagcccgcaggaaatccgcggttccgatgagacctttcataacaagctgtgcttccccgttatgtaccagttttacagccgcttctgctgattttctgatatccggttcatttacaatggttactttgtttacatccagctcgatctcttctgcgatctggcggatctttgcctcatcaccgcagagagttgcctctgcgatccccatctgtactgcctcttttactgcttccagaacaggtctgtcctctgccgcagccactgcgatcctttttttctctctggctaacaggctgtctcttacttctcttaatgatctcattttccaggtcctttctatatttatgatcctatctgttttaactcagttctgccggatctgtgatcacgcccataacagcggatgcagcagctacttccggtgatgacagatatgcttttgcctttggagaaccatagcgtcctaagaagttacggttgttggttccaagaactacctcgtcatctgaaagcagacccatggtacgtccctcacagaaggagcagtacggcggtgttaccagcgctcctgcttctaccagcgtctggatatagccttccttcattgcctcttccataatgctgttggaagcgggtgttacgatgcattttacgtgagagctgatctttttacccttcatcacatttgctgcgatcttcagatcttccaaacggccattggtacaggaaccgataaatacctgatccagtctgacacctttcacctcagacagtggatgcacattatccacatatggcggacaggataatactggctctaaatcttctgccttataagtgagaactctttcatactcagcatcttcatctgcctttacccaggcaacgtcctcataatctacgccgcagtaatcagcgcatttctggtctgctgcgaaaagtcctgcttttccaccgcactctacaaccatgtttgcaatggtcatacggccgtcaatacctaatgcatcaatggcagttccacagaattccagagacttataggtaccgcctgcagctcccagatctcctaatacccgaaggataatgtcctttgcgtatacatgaggaggaagtactccgtcgatctggatcttaatgctgcttggaactcttaaccacatctggccggttccccatacagctgccatttctgtgtatccaacaccggtagagaagcagcctacagcaccgtaggtaggtgtgtgggagtctgttacaaatacaatgtcacctggcttggaatagcctaactcaggaactaactggtgaacgataccgccggtagcgtggaaatggcggataccatactcttttaccagttcataaccggcttccaggcttcgtgggtcgccctctaagcaggctggcatcagatgatcgtgcatgatgacgatcttatctgtattccacaccttggtaagtcccattttcttcattttatcctgaaggaaagcggtataaatatcatggatcactacgcagtccggctctacaactaccagatctcccggctttacgcttttaccgccaatgtgcttcataatgatcttttcagctaatgtatgtcccatattcttacccccttcctataacaggcctttctctacttttttcataatgctctttaccagaccaccgtccatgatgatgtggtacagattttccggaattgccgggatcttgtaagtctttccgttggcactgatctgctgcttatccagctctacttttactgtatctccctcatttacatcatctggaagatccgggcattccagaagtaggataccgttattaatagcattccggaagaaaatacgtgcaaatgattttgcaatgacacagtgtacgccatttgctaccagaacctctgcagcctgttctctggaagaaccacagccaaagttatttcctgctacgatcagatcaccttcacgaagtttagctgccagttccggtcttaaaggctcaaaggcatgaaccttgatctcatccatggtttcatagtttaagtgctgtgttgggatgataatatctgtgtcaatatcatttccaaacttccagcagcgtccttcaaatgtgagagaatgattttctgtctcttcttcctctgctgccggtgcttcttctttataacctaaggttccaagaagggctgcttctacagctgcttttgtggaagtcagataggtctttgatgtgtcaaagccggcataaccaggcttattttccagatcattagataccataacttccgtttttccaatacgtccctgaacttccggatttccgcagtggttgatcacaattccgccagcctctaaaatatctgtaatatatccggcagttgctgccttgatataagtgtctgcatcagaaggtgctactaccaggcgcagtccgtatgcgatctttcttccctttaacatagaagatacggtttccagatcttttaaattgccgccggtagttccgccgataaatacggattttacatctgtcaccggcagttcctctaatgctgcaaactctttatatcctcctggaaaagcagtcagttcttttgtctgtgctgcatcaaatacaacatctgtcttttcctctgcctctttttccactgtaacagcagttgctccggctttttcaagaactccgcagagaaccattttttcagacagttccatatcctctaaggtatctcctgtcaggcttaaaagctttcctgctaaattttctactcccagttcttttaccaagcttaaagccagatcttttgcagaaagtccctctggcagttttccagttaattttactgtttcttttaaagcaccgttttcaggttcttctaacagcagttcgccggtctctaatacctgctttaactgtgtcggatctgcgcaggtgacctgagcgccgatggcgccggctgctcccgctgccttatcacaggtgacagctctctgacctggttttaaaagaccatctgcaagaagctttccgcacattccttttccatagtaaaatggaatgttttccttttctgccttttctcttaaggctttatgtagaccggatacctccggtgaattgggaggtacggtctgatcaactacaactacggttgctactgcgggtttcttttctgtttttaaaaatacctgtgcaagttcattatcctggatcacacacagatccactttctgcatcttcacatttcccatttttattacccctctgccagttttttatactcctggtacttctcctttgcatccagttctgcttctgcaagaagtttttccgcttcctccgggaaggttcttgttaatgcggaaaatcttacttcacccataaggaagtctcttaagttcagagttggctccttggagtccagaacaaatggattttttccttctttcttaaggtctggattatagtggtacaggttccagtaacctgctgctactgcttcttttgcttcctgctgtgcgcatcccatgccctttacaagaccgtggttgatacatggagcataggcgatgatcagggacggacccttgaattcttctgcttcttttaatacctttgccagctgtgcaggatttgcacccatagctacctgggctacatagcagtaaccatactgcattgccatcaggcctaaatctttcttctttgtcttcttaccggaagctgcaaactgtgcaactgcaccgatctgtgttgccttggaagcctgaccgcctgtattggagtaaacttcggtatctacaaccaggatgtttacgtcagttccgcttgctaatacatggtccaaaccgccaaagccgatatcataagcccagccgtcgccgccgtacatccacatggatttcttggacagatgctccttgttgtttaagatatctgccttgcggtcagcctgctctcctgtaagttctgctgcttctaatgccttaaccaggttttcgcttacttccatggtcttgtcgccatcattataagcatcaaaccatgcatcaattgctgcacttaaagatgcatctacgctattttccttcagctcttttacaacacctgcaactctttctctctgctgtgtcactgcaaggcacataccaagggaaaattctgcgttgttctcaaataaggagttggagaatgccggtccaaagcccttttcattggttgtataaggtacacaaggaagtgctgcgccccatgcctgtgtacagccggttgcatttgcgatcaccatacggtcaccaaacatctgggtcatcagctttgcgtaaggtgtttcaccgcagcctgcacatgcgccggagaactctaataatggagtctcaaactgacttcccttaacggtattcttagccagtggatttttcttcttggaaagttttactgcataattccagttttcgatctctgctgcctgggagtctaatggcttcatggtaagagccttttccttagccgggcatacctgaacgcaggcaccgcagcctaagcagtctaatggagaaacctggatcctgtaggtgtattcctctaagccttttccagttgccttctttgtcttaaatccttctggtgcattttctgcttctgctgcacttaccagaaatggacgtactgctgcatgcgggcacacataagaacactggttacactggaggcacttgtccggatcccattcaggaacatctactgctgttcctctcttttcatatttagaagtaccaagaggtacggtaccatcttctctgcctgtaaatgcactgactggaaggctgtcaccctttaaggagttaatcggcagcataagattttttacaaattctggaagattttcatctacctttgctgtctccggctctaaagaagcccattcttccggaacctttacttctaccagtctctggtatccgcagtcaactgcctgatagttcatatttacaaccttttcgcccttctttccgtaggacttaaggatggctttcttcatgtactctactgcatcatcaaatgggatcacatttgccagtttgaagaaagctgactgtaaaactgcgttggtacggtttccaagtccgatctccttaccgatctttactgcattgatgatgtaaaatttaatatggttttctgcaatgtagcgctttacagatgctggcagatgcttgtccagttcatcttcattccagatgcagtttaataagaaagtaccgcctggtttacattcctggacaatgtcatatttctggatataagactgattgtggcaggcaacaaagtctgcatgggataccagatagcttccacggatcggcttatgtccgaaacgaagatgggaacgggtaacaccgccggatttcttggtatcatactcaaaatatgcctgaacatacatatcagtgtggtcaccgatgatcttaatggagttcttgttggcaccaactgtaccgtctgaaccaagtccccagaacttgcagctgatggttccctctgcaactacatcgatcggtgcccctacagccagtgaatgatgggtcacatcatcattgatacctactgtaaagtggttttttggctcttctgcttccaggttgttaaatactgcttcaatctggtttgcagtaacatctttaatagaaagaccatatctgcctgcgtatacacggatatttctgccggactctgcaatagcactgcaaacgtccagatacagaggttcgcctaaagaacctggctccttggtacggtccataactgcaatacgctttacagtctcaggaattgcagaaaggaaatgcttaatggagaatggacggtacagatgtacctgtaaatatccggtctttctgccatgtgcatttaagtaatcaacggtctcacggatcacaccatctacagatcccattgcaatgatcacttcttctgcatccggacatccgtagtagttaaacaggtgataatctcttcctgtgatcttgttgatctctcccatgtagttttcaacgatctcagggatcgcctcataatatgggtttgctgcttcacgatactggaagtatacgtccgggttctgtacggtacttctctgtacaggacgctccggatttaaggatctcttgcggaatgcatccagtgcatctctgtctaagagtctgtctaaatctgcataatccattacttctactttctggatctcatgggaagtacggaaaccatcgaagaaatgaaggaaaggaacacggcccttgatagctgccagatgggcaacgccagccagatccatgatctcctgaaccgtactgctgcaaagcattgcaaaaccggtctgtctggttgccattacatcagagtgctctccgaaaatggagaatgcgtgggttcctacggaacgggcacttacatgaaggacacctgggtgtaactgaccggaaatacggtacattggcgggatcataaggagcaggccctgggatgctgtgtagctggttgccagtgcgccggactccagtgcgccgtgcatagcgccgcaggcgccagcctcagactgcatttctaccagtttgactctctgtccaaacaggtttttcttacctgctgcagaccaggcatctacatgctctgccattggtgaagaaggggtaatggggtaaatggtagctacttctgtaaatgcataagacacataagcagcggcttcattaccatccattgttttcatcaattttttctgtttctcttccatcattttcctcctgagattcgtgaatgcctttatggtatggggtttttaaatctacttggcaatatttctaaatacgtttctaccatggcattctgtatggtaatatttctgtactcactgttttaagggtgttacttttccggctcaagttcttcaaaaagttctactgccggtataattgctgatgcaccatagtaaaagaaaaccagtcttaaaacttcgccgacctcatccatagtggcaccttttttcactgccagttcgccgtgtgttttaatcgtcacagcatttcctgcgcagcatcccataagcattaacatcagttccatgtatttagccggaacatgtgttatatcctgtttgcagatcgcgaactgctggctgaatgcctggagcagctttggatcatttgccatttttttgtggatagaaagaacgtttccgcctctctgctcctttaaccgttccaggatctcttctgcctgggcgatcttttctttattttcctgtttcatggtatgtactccttttgattgtctgttcctttctgtacccacggaatgcgggtacgaaaacattacctttactgatacttcttctgtaaaaatgccggggcaagttcaggaaacagagcgtatgtcataacatcttcttctgttcttgcaaagcctgctgcttctgcttttgctttctcccatccaggagcgatcaggcttcccggacgttctgtgatcattttgtcatttcctaaaacagctgccttcagttccggtgcgatctcaccagccggacgtccgtacatgccgcggatgtaagttttgctctcattggagatcatcttgtatctctgtcccgtaaggacgttaatagttgcctgggcgcctaccatctgagcaaacggagttgctaaaggcggataaccgaaatctttatgtaccttatggacttcctcaaatacttcattaatgcggttttctgcattcatgccttttaactggctttccaggttagaaagcattccgcctgggatctgatgttttaaaacactgatatctacacctgtacgcttgcttgcaaattctttgtatttttcacgcagcttcatgaaataatcattgatctctgccagaaggtccatatccagatgaggatcaaagcctgttccctttaagcaggtaacaatactttcaaccggcggatgggcagggccaagagaaagagcagatacatcgcaatctacggtacaggcaccggctttaatggcttcccaataacagatatccgccataccgccgatacagtgtgcatggaaatgaaccggaagacctacttctttgcggatcgctctgatcacatccgatacctgcttggggttcatcattccggccatatcttctacatggatgacttttacgcccaatgctgcataatcctttgccatctgtacatatttttctaacgtatgtaccgggcttatggtgtagcagatatttgcttctgctgtttttccgtttttaagcactgccttaatggctgtctctgtatttctcacatcgtttaaaccatcaaataccaggaacttatcaattccggcttttgctgccagttctacgaatttttctaccacatcatcgggatactgtttgtagccgatcaggttctgtccacggaggagcattctcagcggtgtcttcttacacagcttcttaaattcccttacccgttcccagggatcatctcctaaatagcggatagcaacatcaaaagttgcaccgccccacatttccatacattcatatccaacctcatccatcttcggcaggatcgggagcatatcctgtgtgcggatcctggttgctaaaagggactgctggccgtcacgccactctacactgctgatcctgatcggtctttcaggaactgtttcttttgctgttttccagaaaaacattctgcacctccatttacatgttttatgtgttttcactggttttcattctctttaggttaatatgttaatttaatttattcgatgtttagttaagttattaacttgtttctgagcaaactatacatcttttctcattaaatagcaatagtaaatgcttatttttttgttttttggatattttgcacagtttttgtgttttgatttagttgatattttaatgttacttgttaacttaagttaatttgttaacttcttatgtctttttaattgcttttatatggggcgtatgatatgataaatacagaataaaaagaacagaccagaaaagaggttttttatgcctacgttaaaagatgtagctgcgctggcaggcgtttcagccgctactgtatccttatatttgaacggaaaatctgcgggaaggatctcccagcagaaacaaaaagaaatagaagaagctttaaaacagttaagttaccagccctcatctgcctccaggcagctaaaagagctgggcacttccccccttatatacacagttgctgtatactgggcagctgacccacgatctgcacttttaggaaaagttatggccgggatccagtcatctcttgccaaaaaccagatgaccaactgcaatattgtgatctgcccatttaagccaaatgaactgtacaaagaaaagggactgatcgatccgaaactgtacaactacgatgctgctatcatcgcaaatactgccgtaatggacatgcagtacttagacagtattatgccgcctatccccgtggtccttttaaacagacgttctgatcagtacagctatgtttccatcaacaaccagaaaatgggtgcctctcttgctgatatgatcgcagaccggggctttaaaagcgtgtctgttttccgttcccagtctccttacctggctgtggatgaccgtgttaccggttttatcaatggctgccgtgccaaaggagtggacatgccaaatcatgccttattttacacagataattctacagacggcggtatccaggctgctgcagaatttctcaagttaagtgaacgtccggatgttgtcttctgtgactccgactccattgccttaggagcactctacgctttctaccaggccggcgtccgtatcccaaaagacctgtccgtcataagcatcggactccatcactcatccaccagtaaatgctccattccgccattaactgtatccgaagttccgctgacacagatggcagaaggctgtatggactatgtgatccgcgctttgacagataaatcctatgctgcagatccagagccggtacatgtagaactggaaacgaagatcattgtgagggagtcgtttcagtaaaatgccgtaaacaaaaaagctattgcaaattgacttcacatcatcactttgcaatagctttctttatactgtatctaagtatctgattttaatatacctgactgattaaatcttagttctcattcatcttagccagttttgcagcctgatctgcggcgatcaggttgtctaacagttcctggatatcaccgttcataatagaatcgatcttgtataaggtcagcttgatcctgtggtcggtaacacggccctgtgggaaattgtaggtacggatcttctcggaacggtctccggtaccgatctggctgcggcgttcttctgcctcggagttctggcgtttttccagctctaaatcatacagtttggaacgtaacagacggaatgctttttccttgttctgcagctgtgatttttctgtctggctgtagataacgataccagtcggtatatgggtcagacgtactgcggagtcagtggtattgacacactgtccaccgttaccagacgcacgcattacgtcaatgcggcagtcgttcatatcgatctgaacatctacttcttctgcttccggcataactgctacggttgctgtagaggtatggatacggccgccggactctgtctcaggcacacgctgtacacgatgtacaccgctctcatattttaacttggaataagcgccctttcctgtgaccatagccacaacttccttaaagccgccaataccattttcattgatactgatgatctctactttccagtgctggctgtctgcgtagttggaatacatacggtaaagctcagctgcaaaaagagctgcctcgtcaccacctgcacctgcacggatctccaggataatgttcttatcatcattagggtcttttggaagaagaaggatctttaattcatgctccagttcctcaatgcgcttctttgcatcggataattcttcctttgccatttcacgcatttcctcatcattttcttcctctaacattgccagactatcttctacgtcctgctttgcctgcttatactgcttataagcttctacgatcggtgccagttcagcctgctccttcatcaacttggtaaaacgtttggtatcctgggtcacatccgggtccccaagcatacgcatcagttcttcataatggatcaacatatcatccagtttatcaaacataatttttacttctccttcctggcacataccacccggtcgtttccagccatatcccggacagtcctaagcccactaaatcccattgcttcaaatatttctgttacatcctttgcctgatcccagccaatctccatatagatctctcc
